(19) United States
(12) Patent Application Publication
(10) Pub. No.: US 2022/0170013 A1
(43) Pub. Date: Jun. 2, 2022

(54) T:A TO A:T BASE EDITING THROUGH ADENOSINE METHYLATION

(71) Applicants: The Broad Institute, Inc., Cambridge, MA (US); President and Fellows of Harvard College, Cambridge, MA (US)

(72) Inventors: David R. Liu, Cambridge, MA (US); Jessie Rose Davis, Cambridge, MA (US); Jordan Leigh Doman, Cambridge, MA (US); Kevin Tianmeng Zhao, Cambridge, MA (US); Michelle Richter, Cambridge, MA (US)

(73) Assignees: The Broad Institute, Inc., Cambridge, MA (US); President and Fellows of Harvard College, Cambridge, MA (US)

(21) Appl. No.: 17/436,048

(22) PCT Filed: Mar. 6, 2020
(86) PCT No.: PCT/US2020/021398

§ 371 Date: Sep. 2, 2021

Related U.S. Application Data
(60) Provisional application No. 62/814,793, filed on Mar. 6, 2019.

(51) Int. Cl. C12N 15/11; C12N 9/22; C12N 9/10

(52) U.S. Cl. CPC C12N 15/111; C12N 9/22; C12N 2310/20; C12Y 201/01072; C12N 9/1007

(57) ABSTRACT

The present disclosure provides for base editors which satisfy a need in the art for installation of targeted transversions of thymine (T) to adenine (A), or correspondingly, trans versions of adenine (A) to thymine (T). The nucleobase editor domains include a nucleic acid programmable DNA binding protein and an adenosine methyltransferase domain. The base editors may be engineered through the use of continuous or non-continuous evolution systems, such as phage-assisted continuous evolution (PACE). In particular, the present disclosure provides for evolved adenine-to-thymine (or thymine-to-adenine) base editor variants that overcome deficiencies in the art for base editors that can install single-base A:T to T:A transversion mutations. In some embodiments, methods for targeted nucleic acid editing are provided. In some embodiments, pharmaceutical compositions comprising, and vectors and kits for the generation of, targeted base editors are provided. In some embodiments, cells containing such vectors are provided. In some embodiments, methods of treatment comprising administering the base editors are provided.

### RELATED APPLICATIONS

[0001] This application claims benefit of U.S. Provisional Application No. 62/814,793, filed on Mar. 6, 2019, the entire disclosure of which is incorporated by reference herein.

### BACKGROUND OF THE DISCLOSURE

[0002] Developing robust methods to introduce and correct point mutations is therefore important in understanding and treating diseases with a genetic component.

[0003] Base editing involves the conversion of a specific nucleic acid base into another at a targeted genomic locus. For certain approaches, this can be achieved without requiring double-stranded DNA breaks (DSB). Since many genetic diseases arise from point mutations, this technology has important implications in the study of human health and disease. Engineered base editors are capable of editing many targets with high efficiency, often achieving editing of 30-70% of cells following a single treatment, without selective enrichment of the cell population for editing events.

### SUMMARY OF THE DISCLOSURE

[0004] Engineered base editors have been recently developed. Reference is made to Komor, A. C. et al., Improved base excision repair inhibition and bacteriophage Mu Gam protein yields C:G-to-T:A base editors with higher efficiency and product purity, Sci Adv 3 (2017) and Rees, H. A. et al., Improving the DNA specificity and applicability of base editing through protein engineering and protein delivery, Nat. Commun. 8, 15790 (2017)); U.S. Patent Publication No. 2018/0073012, published Mar. 15, 2018, U.S. Patent Publication No. 2017/0121693, published May 4, 2017, International Publication No. WO 2017/070633, published Apr. 27, 2017, and U.S. Patent Publication No. 2015/0166980, published Jun. 18, 2015, U.S. Pat. No. 9,840,699, issued Dec. 12, 2017, U.S. Pat. No. 10,077,453, issued Sep. 18, 2018, and International Application No. PCT/US2019/61685, filed Nov. 15, 2019, each of which are incorporated herein in their entireties. Base editors (BEs) are typically fusions of a Cas (“CRISPR-associated”) domaindomain and a nucleobase modification domaindomain (e.g., a natural or evolved deaminase, such as a cytidine deaminase that include APOBEC1 (“apolipoprotein B mRNA editing enzyme, catalytic polypeptide 1”), CDA (“cytidine deaminase”), and AID (“activation-induced cytidine deaminase”)) domains. In some cases, base editors may also include proteins or domains that alter cellular DNA repair processes to increase the efficiency and/or stability of the resulting single-nucleotide change.

[0005] Two classes of base editors have been generally described to date: cytidine base editors convert target C:G base pairs to T:A base pairs, and adenine base editors convert A:T base pairs to G:C base pairs. Collectively, these two classes of base editors enable the targeted installation of all possible transition mutations (C-to-T, G-to-A, A-to-G, T-to-C, C-to-U, and A-to-U), which collectively account for about 61% of known human pathogenic single nucleotide polymorphisms (SNPs) in the ClinVar database. See Gaudelli, N. M. et al., Programmable base editing of A:T to G:C in genomic DNA without DNA cleavage. Nature 551, 464-471 (2017). In particular, C-to-T base editors use a cytidine deaminase to convert cytidine to uridine in the single-stranded DNA loop created by the Cas9 (“CRISPR-associated protein 9”) domain. The opposite strand is nicked by Cas9 to stimulate DNA repair mechanisms that use the edited strand as a template, while a fused uracil glycosylase inhibitor slows excision of the edited base. Eventually, DNA repair leads to a C:G to T:A base pair conversion. This class of base editor is described in U.S. Pat. No. 10,167,457, issued Jan. 1, 2019, and U.S. Patent Publication No. 2017/0121693, published May 4, 2017, which is incorporated by reference in its entirety herein.

[0006] A major limitation of base editing is the inability to generate transversion (purine↔pyrimidine) changes, which are needed to correct ˜38% of known human pathogenic SNPs. See Komor, A. C. et al., Programmable editing of a target base in genomic DNA without double-stranded DNA cleavage, Nature 533, 420-424 (2016) and Landrum, M. J. et al., ClinVar: public archive of relationships among sequence variation and human phenotype, Nucleic Acids Res. 42, D980-985 (2014), each of which is incorporated by reference. Of this ˜38% of known pathogenic SNPs, about 15% arise from C:G to A:T mutations. Many C:G to A:T point mutations introduce premature stop codons (UAA, UAG, UGA), resulting in nonsense mutations in protein coding regions.

[0007] Currently, transversions can only be repaired by nuclease-mediated formation of a double-stranded break (DSB) followed by homology directed repair (HDR), which is typically inefficient, especially in non-mitotic cells, and leads to undesired by-products, such as indels (insertions and deletions) and translocations. See Komor, A. C., Badran, A. H. & Liu, D. R. CRISPR-Based Technologies for the Manipulation of Eukaryotic Genomes, Cell 168, 20-36, (2017), which is incorporated herein by reference. Since nucleobase deamination alone cannot interconvert purines and pyrimidines, the development of transversion base editors requires the development of a new editing strategy, such as the manipulation of endogenous DNA repair pathways or a different nucleobase chemical transformation. The present disclosure describes novel transversion base editors using an innovative adenosine methylation strategy. The present disclosure greatly expands the capabilities of base editing.

[0008] The present disclosure provides transversion base editors which add to the repertoire of base editors that have already been developed. In particular, the present disclosure provides for adenine-to-thymine or “ATBE” (or thymine-to-adenine or “TABE”) transversion base editors which satisfy the need in the art for the installation of targeted single-base transversion nucleobase changes in a target nucleotide sequence, e.g., a genome. In addition, the present disclosure provides for nucleic acid molecules encoding and/or expressing the thymine-to-adenine and adenine-to-thymine transversion base editors described herein, as well as expression vectors or constructs for expressing these transversion base editors, host cells comprising said nucleic acid molecules and expression vectors, and compositions for delivering and/or administering nucleic acid-based embodiments described herein. In addition, the disclosure provides for compositions comprising these transversion base editors. Still further, the present disclosure provides for methods of making the transversion base editors, as well as methods of using the transversion base editors or nucleic acid molecules encoding such transversion base editors in applications including editing a nucleic acid molecule, e.g., a genome.

[0009] The present inventors have developed novel transversion base editors, and in particular a novel base editor that installs an A-to-T transversion in a targeted manner, through a adenosine methylation reaction. This new strategy allows for the efficient and specific transversion of A-to-T or T-to-A using the inventive base editors described herein.

[0010] Specifically, enzyme-catalyzed methylation of a targeted A in a nucleic acid of interest is induced, resulting in N1-methyladenosine formation. N1-methyladenosine disrupts the hydrogen bonding interactions with the base-paired thymine of the unmutated strand. Without wishing to be bound by any particular theory, the cell's replication machinery interprets the methylated adenine as a thymine, and converts the mismatched thymine to an adenine. During a subsequent round of replication or mismatch repair, the methylated adenine is converted to a thymine. A desired A-to-T transversion is thus achieved. Adenine methylation is achieved by the targeted use of a fusion protein comprising a Cas9 (e.g., dCas9 or nCas9) domain, an adenosine methyltransferase domain, and optionally linkers interconnecting these domains (see FIG. 1A).

[0011] The nucleic acid programmable DNA binding protein (napDNAbp) may be a Cas9 domain. The napDNAbp may also be a CasX, a CasY, a C2c1, a C2c2, a C2c3, a GeoCas9, a CjCas9, a Cas12a (formerly known as Cpf1), a Cas12b, a Cas12g, a Cas12h, a Cas12i, a Cas13b, a Cas13c, a Cas13d, a Cas14, a Csn2, an xCas9, an SpCas9-NG, an LbCas12a, an AsCas12a, a Cas9-KKH, a circularly permuted Cas9, an Argonaute (Ago), a SmacCas9, or a Spy-macCas9. The Cas9 domain may be a nuclease active Cas9 domain, a nuclease inactive Cas9 (dCas9) domain, or a Cas9 nickase (nCas9) domain. Further, the domains of the base editor fusion protein may be interconnected with a linker. This linker may be any suitable amino acid linker, synthetic linker, polymer, or a covalent bond. Exemplary linkers include any of the following amino acid sequences: SGGSSGGSSGSETPGTSESATPESSGGSSGGS (SEQ ID NO: 5); SGGSGGSGGS (SEQ ID NO: 6); GGG; GGGS (SEQ ID NO: 10); SGGGS (SEQ ID NO: 1); SGSETPGTSESATPES (SEQ ID NO: 55); or SGGS (SEQ ID NO: 8).

[0012] The base editor fusion protein comprises (i) a nucleic acid programmable DNA binding protein (napDNAbp), and (ii) an adenosine methyltransferase.

[0013] In various embodiments of the base editor fusion proteins, the adenosine methyltransferase is a wild-type adenosine methyltransferase. In certain embodiments, the adenosine methyltransferase is a wild-type complex (or heterodimer) of subunits TRMT6 and TRMT61A (“TRMT6/61A”), or a variant thereof, which methylates an adenosine in a nucleic acid. In certain embodiments, the TRMT6/61A is a human TRMT6/61A, or a variant thereof.

[0014] In various embodiments, the adenosine methyltransferase comprises any one of the amino acid sequences of SEQ ID NOs: 16-21 and 57-59. In various embodiments, the adenosine methyltransferase comprises an amino acid sequence that is at least 80%, 85%, 90%, 95%, 98%, or 99% identical to the amino acid sequence of any one of SEQ ID NOs: 16-21 and 57-59. In particular embodiments, adenosine methyltransferase comprises a dimer of two adenosine methyltransferase domains. In particular embodiments, adenosine methyltransferase comprises a heterodimer of a) a first adenosine methyltransferase domain that comprises an amino acid sequence that is at least 80%, 85%, 90%, 95%, 98%, or 99% identical to the amino acid sequence of SEQ ID NO: 16, and b) a second adenosine methyltransferase domain that comprises an amino acid sequence that is at least 80%, 85%, 90%, 95%, 98%, or 99% identical to the amino acid sequence of SEQ ID NO: 17.

[0015] In certain embodiments within this strategy, the base editor fusion protein further comprises an inhibitor of DNA alkylation repair (“iDAR”) that may covalently or non-covalently bind to a mutated nucleobase to prevent its excision during subsequent mismatch repair or oxidative repair. Use of an iDAR in the base editor fusion protein may increase base editing efficiency for the adenosine methylation and other alkylation strategies. In certain embodiments, the iDAR may comprise a catalytically inactive glycosylase or catalytically inactive dioxygenase that binds N1-methyladenosine to prevent its excision during subsequent mismatch repair.

[0016] In various embodiments, the base editor fusion proteins described herein may comprise any of the following structures: NH₂-[napDNAbp]-[adenosine methyltransferase]-COOH; or NH₂-[adenosine methyltransferase]-[napDNAbp]-COOH; wherein each instance of “]-[” comprises an optional linker.

[0017] In various embodiments, when the fusion proteins include an iDAR domain, the base editor fusion proteins described herein can may comprise any of the following structures: NH₂-[iDAR]-[napDNAbp]-[adenosine methyltransferase]-COOH; NH₂-[napDNAbp]-[iDAR]-[adenosine methyltransferase]-COOH; NH₂-[napDNAbp]-[adenosine methyltransferase]-[iDAR]-COOH; NH₂-[iDAR]-[adenosine methyltransferase]-[napDNAbp]-COOH; NH₂-[adenosine methyltransferase]-[iDAR]-[napDNAbp]-COOH; or NH₂-[adenosine methyltransferase]-[napDNAbp]-[iDAR]-COOH; wherein each instance of “]-[” comprises an optional linker.

[0018] In various other embodiments, the disclosure provides nucleic acid molecules or constructs encoding any of the base editor fusion proteins, or domains thereof. The nucleic acid sequences may be codon-optimized for expression in the cells of any organism of interest. In certain embodiments, the nucleic acid sequence is codon-optimized for expression in human cells.

[0019] In other embodiments, the disclosure provides polynucleotides and/or vectors encoding any of the base editor fusion proteins described herein, or domains thereof. These nucleic acid sequences are typically engineered or modified experimentally. For instance, these nucleic acid sequences may be codon-optimized for expression in an organism of interest, e.g. mammalian cells. In certain embodiments, the nucleic acid sequences are codon-optimized for expression in human cells. In other embodiments, cells containing such polynucleotides or constructs are provided. In other embodiments, complexes comprising any of the fusion proteins described herein and a guide RNA bound to the napDNAbp domain of the fusion protein are provided.

[0020] In other embodiments, the disclosure provides a pharmaceutical composition comprising any of the fusion proteins described herein and a pharmaceutically acceptable excipient. In certain embodiments, the pharmaceutical composition further comprises a gRNA. In other embodiments, the disclosure provides a kit comprising a nucleic acid construct that includes (i) a nucleic acid sequence encoding any of the fusion proteins described herein; (ii) a heterologous promoter that drives expression of the sequence of (i); and optionally an expression construct encoding a guide RNA backbone and the target sequence.

[0021] In some embodiments, methods for targeted nucleic acid editing are provided. The methods described herein typically comprise i) contacting a nucleic acid sequence with a complex comprising any of the fusion proteins described herein and a guide nucleic acid, wherein the double-stranded DNA comprises a target A:T (or T:A) nucleobase pair, and ii) editing the thymine (or adenine) of the A:T (or T:A) nucleobase pair. The methods may further comprise iii) cutting or nicking the non-edited strand of the double-stranded DNA.

[0022] In some embodiments, methods of treatment using the inventive base editors are provided. The methods described herein may comprise treating a subject having or at risk of developing a disease, disorder, or condition, comprising administering to the subject a fusion protein as described herein, a polynucleotide as described herein, a vector as described herein, or a pharmaceutical composition as described herein.

[0023] It should be appreciated that the foregoing concepts, and additional concepts discussed below, may be arranged in any suitable combination, as the present disclosure is not limited in this respect. Further, other advantages and novel features of the present disclosure will become apparent from the following detailed description of various non-limiting embodiments when considered in conjunction with the accompanying figures.

### BRIEF DESCRIPTION OF THE DRAWINGS

[0024] The following drawings form part of the present disclosure and are included to further demonstrate certain embodiments of the present disclosure, which can be better understood by reference to one or more of these drawings in combination with the detailed description of specific embodiments presented herein.

[0025] FIG. 1A is a schematic illustration showing an exemplary fusion protein of the disclosure. A fusion protein comprising a dCas9 domain linked to an adenosine methyltransferase enzyme is targeted to the correct adenosine base through the hybridization of an sgRNA to a complementary sequence of a nucleic acid. The adenosine methyltransferase methylates the adenosine to an N1-methyladenosine, and subsequently, the cell's native replication/repair machinery recognizes the mutated base and effects the desired change to a thymine nucleobase. Abbreviations: m1A, N1-methyladenosine; iDAR, inhibitor of DNA alkylation repair; sgRNA, single-guide RNA; PAM, protospacer adjacent motif.

[0026] FIG. 1B depicts the nucleobase editor-mediated conversion of adenosine to N1-methyladenosine and the sterically induced rotation of the N1-methyladenosine product to the syn orientation, which presents the Hoogsteen edge for base pairing. Without wishing to be bound by any particular theory, during replication or repair of the unmutated strand, the N1-methyladenosine interpreted by a polymerase as a thymine, and the cell's mismatch repair machinery converts the base-paired thymine of the non-edited strand to an adenine to correct the apparent mismatch. Upon the next round of replication, the cell's mismatch repair converts the N1-methyladenosine to a thymine. Abbreviation: m1A, N1-methyladenosine.

[0027] FIG. 2 depicts an exemplary assay for selection of evolved variants of E. coli TRM6/61A tRNA methyltransferase that are highly effective at methylating thymine. Libraries of mutagenized TRM6/61A—dCas9 fusion proteins, targeting guide RNAs, and a selection plasmid containing an inactivated spectinomycin resistance gene with mutations at the active site (D182V or K205T) that require T:A to A:T editing to correct, are transformed into E. coli cells, which are plated onto agar media containing spectinomycin and sucrose. Cells harboring plasmids with TRM6/61A mutants that restore antibiotic resistance are isolated and subjected to further rounds of mutation and selection under varying selection stringencies. TRM6/61A variants emerging from each round of selection are then expressed within a fusion construct comprising a Cas9 nickase (nCas9). The resulting fusion proteins are tested for base editing activity in mammalian cells.

### Definitions

[0028] As used herein and in the claims, the singular forms “a,” “an,” and “the” include the singular and the plural reference unless the context clearly indicates otherwise. Thus, for example, a reference to “an agent” includes a single agent and a plurality of such agents.

[0029] The term “accessory plasmid,” as used herein, refers to a plasmid comprising a gene required for the generation of infectious viral particles under the control of a conditional promoter. In the context of continuous evolution of genes, transcription from the conditional promoter of the accessory plasmid is typically activated, directly or indirectly, by a function of the gene to be evolved. Accordingly, the accessory plasmid serves the function of conveying a competitive advantage to those viral vectors in a given population of viral vectors that carry a version of the gene to be evolved able to activate the conditional promoter or able to activate the conditional promoter more strongly than other versions of the gene to be evolved. In some embodiments, only viral vectors carrying an “activating” version of the gene to be evolved will be able to induce expression of the gene required to generate infectious viral particles in the host cell, and, thus, allow for packaging and propagation of the viral genome in the flow of host cells. Vectors carrying non-activating versions of the gene to be evolved, on the other hand, will not induce expression of the gene required to generate infectious viral vectors, and, thus, will not be packaged into viral particles that can infect fresh host cells. Exemplary accessory plasmids have been described, for example in U.S. application Ser. No. 15/567,312, published as U.S. Pub. No. 2018/0087046, filed on Apr. 15, 2016, the entire contents of which is incorporated by reference.

[0030] “Base editing” is a genome editing technology that involves the conversion of a specific nucleic acid base into another at a targeted genomic locus. In certain embodiments, this can be achieved without requiring double-stranded DNA breaks (DSB). To date, other genome editing techniques, including CRISPR-based systems, begin with the introduction of a DSB at a locus of interest. Subsequently, cellular DNA repair enzymes mend the break, commonly resulting in random insertions or deletions (indels) of bases at the site of the DSB. However, when the introduction or correction of a point mutation at a target locus is desired rather than stochastic disruption of the entire gene, these genome editing techniques are unsuitable, as correction rates are low (e.g., typically 0.1% to 5%), with the major genome editing products being indels. In order to increase the efficiency of gene correction without simultaneously introducing random indels, the present inventors previously modified the CRISPR/Cas9 system to directly convert one DNA base into another without DSB formation. See, Komor, A. C., et al., Programmable editing of a target base in genomic DNA without double-stranded DNA cleavage. Nature 533, 420-424 (2016), the entire contents of which is incorporated by reference herein.

[0031] In principle, there are 12 possible base-to-base changes that may occur via individual or sequential use of transition (i.e., a purine-to-purine change or pyrimidine-to-pyrimidine change) or transversion (i.e., a purine-to-pyrimidine or pyrimidine-to-purine) editors. These include:
[0032] Transition base editors:
   [0033] C-to-T base editor (or “CTBE”). This type of editor converts a C:G Watson-Crick nucleobase pair to a T:A Watson-Crick nucleobase pair. Because the corresponding Watson-Crick paired bases are also interchanged as a result of the conversion, this category of base editor may also be referred to as a G-to-A base editor (or “GABE”).
   [0034] A-to-G base editor (or “AGBE”). This type of editor converts a A:T Watson-Crick nucleobase pair to a G:C Watson-Crick nucleobase pair. Because the corresponding Watson-Crick paired bases are also interchanged as a result of the conversion, this category of base editor may also be referred to as a T-to-C base editor (or “TCBE”).
[0035] Transversion base editors:
   [0036] C-to-G base editor (or “CGBE”). This type of editor converts a C:G Watson-Crick nucleobase pair to a G:C Watson-Crick nucleobase pair. Because the corresponding Watson-Crick paired bases are also interchanged as a result of the conversion, this category of base editor may also be referred to as a G-to-C base editor (or “GCBE”).
   [0037] A-to-C base editor (or “ACBE”). This type of editor converts a A:T Watson-Crick nucleobase pair to a C:G Watson-Crick nucleobase pair. Because the corresponding Watson-Crick paired bases are also interchanged as a result of the conversion, this category of base editor may also be referred to as a T-to-G base editor (or “TGBE”).
   [0038] G-to-T base editor (or “TABE”). This type of editor converts a G:C Watson-Crick nucleobase pair to a T:A Watson-Crick nucleobase pair. Because the corresponding Watson-Crick paired bases are also interchanged as a result of the conversion, this category of base editor may also be referred to as a C-to-A base editor (or “CABE”).
   [0039] A-to-T base editor (or “ATBE”). This type of editor converts an A:T Watson-Crick nucleobase pair to a T:A Watson-Crick nucleobase pair. Because the corresponding Watson-Crick paired bases are also interchanged as a result of the conversion, this category of base editor may also be referred to as a T-to-A base editor (or “TABE”).

[0040] The term “base editors (BEs)”, as used herein, refers to the Cas-fusion proteins described herein. In some embodiments, the fusion protein comprises a nuclease-inactive Cas9 (dCas9) fused to a adenosine methyltransferase which binds nucleic acid in a guide RNA-programmed manner via the formation of an R-loop, but does not cleave the nucleic acid. For example, the dCas9 domain of the fusion protein may include a D10A and a H840A mutation (which renders Cas9 capable of cleaving only one strand of a nucleic acid duplex), as described in PCT/US2016/058344 (filed on Oct. 22, 2016 and published as WO 2017/070632 on Apr. 27, 2017), which is incorporated herein by reference in its entirety. The DNA cleavage domain of S. pyogenes Cas9 includes two subdomains, the HNH nuclease subdomain and the RuvC1 subdomain. The HNH subdomain cleaves the strand complementary to the gRNA (the “targeted strand,” or the strand at which editing or methylation occurs), whereas the RuvC1 subdomain cleaves the non-complementary strand containing the PAM sequence (the “non-targeted strand”, or the strand at which editing or methylation does not occur). The RuvC1 mutant D10A generates a nick on the targeted strand, while the HNH mutant H840A generates a nick on the non-targeted strand (see Jinek et al., Science. 337:816-821(2012); Qi et al., Cell. 28; 152(5):1173-83 (2013)).

[0041] In some embodiments, the fusion protein comprises a Cas9 nickase fused to an adenosine methyltransferase, e.g., an adenosine methyltransferase which converts an adenine nucleobase to N1-methyladenine. The term “base editors” encompasses the base editors described herein as well as any base editor known or described in the art at the time of this filing or developed in the future. Reference is made to Rees & Liu, Base editing: precision chemistry on the genome and transcriptome of living cells, Nat Rev Genet. 2018; 19(12):770-788; as well as U.S. Patent Publication No. 2018/0073012, published Mar. 15, 2018, which issued as U.S. Pat. No. 10,113,163; on Oct. 30, 2018; U.S. Patent Publication No. 2017/0121693, published May 4, 2017, which issued as U.S. Pat. No. 10,167,457 on Jan. 1, 2019, as U.S. Pat. No. 10,167,457; International Publication No. WO 2017/070633, published Apr. 27, 2017; International Publication No. WO 2018/027078, published Aug. 2, 2018; International Application No PCT/US2018/056146, filed Oct. 16, 2018, which published as Publication No. WO 2019/079347 on Apr. 25, 2019; International Application No PCT/US2019/033848, filed May 23, 2019, which published as Publication No. WO 2019/226593 on Nov. 28, 2019; U.S. Patent Publication No. 2015/0166980, published Jun. 18, 2015; U.S. Pat. No. 9,840,699, issued Dec. 12, 2017; U.S. Pat. No. 10,077,453, issued Sep. 18, 2018; International Publication No. WO 2019/023680, published Jan. 31, 2019; International Publication No. WO 2018/0176009, published Sep. 27, 2018; International Application No. PCT/US2019/47996, filed Aug. 23, 2019; International Application No. PCT/US2019/049793, filed Sep. 5, 2019; U.S. Provisional Application No. 62/835,490, filed Apr. 17, 2019; International Application No. PCT/US2019/61685, filed Nov. 15, 2019; International Application No. PCT/US2019/57956, filed Oct. 24, 2019, the contents of each of which are incorporated herein by reference in their entireties.

[0042] The term “Cas9” or “Cas9 nuclease” or “Cas9 domain” refers to to a CRISPR associated protein 9, or variant thereof, and embraces any naturally occurring Cas9 from any organism, any naturally-occurring Cas9, any Cas9 homolog, ortholog, or paralog from any organism, and any variant of a Cas9, naturally-occurring or engineered. More broadly, a Cas9 protein, domain, or domain is a type of “nucleic acid programmable DNA binding protein (napDNAbp)”. The term Cas9 is not meant to be limiting and may be referred to as a “Cas9 or variant thereof.” Exemplary Cas9 proteins are described herein and also described in the art. The present disclosure is unlimited with regard to the particular Cas9 that is employed in the base editors of the disclosure.

[0043] In some embodiments, proteins comprising Cas9 or fragments thereof are referred to as “Cas9 variants.” A Cas9 variant shares homology to Cas9, or a fragment thereof. Cas9 variants include functional fragments of Cas9. For example, a Cas9 variant is at least about 70% identical, at least about 80% identical, at least about 90% identical, at least about 95% identical, at least about 96% identical, at least about 97% identical, at least about 98% identical, at least about 99% identical, at least about 99.5% identical, or at least about 99.9% identical to wild type Cas9. In some embodiments, the Cas9 variant may have 1, 2, 3, 4, 5, 6, 7, 8, 9, 10, 11, 12, 13, 14, 15, 16, 17, 18, 19, 20, 21, 22, 21, 24, 25, 26, 27, 28, 29, 30, 31, 32, 33, 34, 35, 36, 37, 38, 39, 40, 41, 42, 43, 44, 45, 46, 47, 48, 49, 50 or more amino acid changes compared to a wild type Cas9. In some embodiments, the Cas9 variant comprises a fragment of Cas9 (e.g., a gRNA binding domain or a DNA-cleavage domain), such that the fragment is at least about 70% identical, at least about 80% identical, at least about 90% identical, at least about 95% identical, at least about 96% identical, at least about 97% identical, at least about 98% identical, at least about 99% identical, at least about 99.5% identical, or at least about 99.9% identical to the corresponding fragment of wild type Cas9. In some embodiments, the fragment is is at least 30%, at least 35%, at least 40%, at least 45%, at least 50%, at least 55%, at least 60%, at least 65%, at least 70%, at least 75%, at least 80%, at least 85%, at least 90%, at least 95% identical, at least 96%, at least 97%, at least 98%, at least 99%, or at least 99.5% of the amino acid length of a corresponding wild type Cas9.

[0044] As used herein, the term “dCas9” refers to a nuclease-inactive Cas9 or nuclease-dead Cas9, or a functional fragment or variant thereof, and embraces any naturally occurring dCas9 from any organism, any naturally-occurring dCas9 equivalent or functional fragment thereof, any dCas9 homolog, ortholog, or paralog from any organism, and any mutant or variant of a dCas9, naturally-occurring or engineered. The term dCas9 is not meant to be particularly limiting and may be referred to as a “dCas9 or equivalent.” Exemplary dCas9 proteins and method for making dCas9 proteins are further described herein and/or are described in the art and are incorporated herein by reference.

[0045] As used herein, the term “nCas9” or “Cas9 nickase” refers to a Cas9 or a functional fragment or variant thereof, which cleaves or nicks only one of the strands of a target cut site thereby introducing a nick in a double strand DNA molecule rather than creating a double strand break. This can be achieved by introducing appropriate mutations in a wild-type Cas9 which inactives one of the two endonuclease activities of the Cas9. Any suitable mutation which inactivates one Cas9 endonuclease activity but leaves the other intact is contemplated, such as one of D10A or H840A mutations in the wild-type Cas9 amino acid sequence (e.g., SEQ ID NO: 9) may be used to form the nCas9.

[0046] The term “continuous evolution,” as used herein, refers to an evolution procedure, (e.g., PACE) in which a population of nucleic acids is subjected to multiple rounds of (a) replication, (b) mutation, and (c) selection to produce a desired evolved product, for example, a nucleic acid encoding a protein with a desired activity, wherein the multiple rounds can be performed without investigator interaction and wherein the processes under (a)-(c) can be carried out simultaneously. Typically, the evolution procedure is carried out in vitro, for example, using cells in culture as host cells. In general, a continuous evolution process provided herein relies on a system in which a gene of interest is provided in a nucleic acid vector that undergoes a life-cycle including replication in a host cell and transfer to another host cell, wherein a critical component of the life-cycle is deactivated and reactivation of the component is dependent upon a desired mutation in the gene of interest. Reference is made to U.S. Patent Publication No. 2013/0345064, which published on Dec. 26, 2013 and issued as U.S. Pat. No. 9,394,537 on Jul. 19, 2016; U.S. Patent Publication No. 2016/0348096, which published on Dec. 1, 2016 and issued as U.S. Pat. No. 10,179,911 on Jan. 15, 2019; U.S. Patent Publication No. 2017/0233708, which published Aug. 17, 2017; and U.S. Patent Publication No. 2017/0044520, which published on Feb. 16, 2017, the contents of each of which are incorporated herein by reference in their entireties.

[0047] In some embodiments, the nucleic acid vector comprising the gene of interest is a phage, a viral vector, or naked DNA (e.g., a mobilization plasmid). In some embodiments, transfer of the gene of interest from cell to cell is via infection, transfection, transduction, conjugation, or uptake of naked DNA, and efficiency of cell-to-cell transfer (e.g., transfer rate) is dependent on the activity of a product encoded by the gene of interest. For example, in some embodiments, the nucleic acid vector is a phage harboring the gene of interest and the efficiency of phage transfer (via infection) is dependent on an activity of the gene of interest in that a protein required for the generation of phage particles (e.g., pIII for M13 phage) is expressed in the host cells only in the presence of the desired activity of the gene of interest. In another example, the nucleic acid vector is a retroviral vector, for example, a lentiviral or vesicular stomatitis virus vector harboring the gene of interest, and the efficiency of viral transfer from cell to cell is dependent on an activity of the gene of interest in that a protein required for the generation of viral particles (e.g., an envelope protein, such as VSV-g) is expressed in the host cells only in the presence of the desired activity of the gene of interest. In another example, the nucleic acid vector is a DNA vector, for example, in the form of a mobilizable plasmid DNA, comprising the gene of interest, that is transferred between bacterial host cells via conjugation and the efficiency of conjugation-mediated transfer from cell to cell is dependent on the activity of the gene of interest in that a protein required for conjugation-mediated transfer (e.g., traA or traQ) is expressed in the host cells only in the presence of the desired activity of the gene of interest. Host cells contain F plasmid lacking one or both of those genes.

[0048] For example, some embodiments provide a continuous evolution system, in which a population of viral vectors comprising a gene of interest to be evolved replicates in a flow of host cells, e.g., a flow through a lagoon, wherein the viral vectors are deficient in a gene encoding a protein that is essential for the generation of infectious viral particles, and wherein that gene is comprised in the host cell under the control of a conditional promoter that can be activated by a gene product encoded by the gene of interest, or a mutated version thereof. In some embodiments, the activity of the conditional promoter depends on a desired function of a gene product encoded by the gene of interest. Viral vectors, in which the gene of interest has not acquired a mutation conferring the desired function, will not activate the conditional promoter, or only achieve minimal activation, while any mutation in the gene of interest that confers the desired mutation will result in activation of the conditional promoter. Since the conditional promoter controls an essential protein for the viral life cycle, activation of this promoter directly corresponds to an advantage in viral spread and replication for those vectors that have acquired an advantageous mutation.

[0049] “CRISPR” is a family of DNA sequences (i.e., CRISPR clusters) in bacteria and archaea that represent snippets of prior infections by a virus that have invaded the prokaryote. The snippets of DNA are used by the prokaryotic cell to detect and destroy DNA from subsequent attacks by similar viruses and effectively constitute, along with an array of CRISPR-associated proteins (including Cas9 and homologs thereof) and CRISPR-associated RNA, a prokaryotic immune defense system. In nature, CRISPR clusters are transcribed and processed into CRISPR RNA (crRNA). In certain types of CRISPR systems (e.g., type II CRISPR systems), correct processing of pre-crRNA requires a trans-encoded small RNA (tracrRNA), endogenous ribonuclease 3 (rnc), and a Cas9 protein. The tracrRNA serves as a guide for ribonuclease 3-aided processing of pre-crRNA. Subsequently, Cas9/crRNA/tracrRNA endonucleolytically cleaves linear or circular nucleic acid target complementary to the RNA. Specifically, the target strand not complementary to crRNA is first cut endonucleolytically, then trimmed 3′-5′ exonucleolytically. In nature, DNA-binding and cleavage typically requires protein and both RNAs. However, single guide RNAs (“sgRNA”, or simply “gRNA”) can be engineered so as to incorporate embodiments of both the crRNA and tracrRNA into a single RNA species—the guide RNA. See, e.g., Jinek M., et al., Science 337:816-821(2012), the entire contents of which is herein incorporated by reference. Cas9 recognizes a short motif in the CRISPR repeat sequences (the PAM or protospacer adjacent motif) to help distinguish self versus non-self. CRISPR biology, as well as Cas9 nuclease sequences and structures are well known to those of skill in the art (see, e.g., “Complete genome sequence of an M1 strain of Streptococcus pyogenes.” Ferretti J. J., et al., Proc. Natl. Acad. Sci. U.S.A. 98:4658-4663(2001); “CRISPR RNA maturation by trans-encoded small RNA and host factor RNase III.” Deltcheva E., et al., Nature 471:602-607 (2011); and “A programmable dual-RNA-guided DNA endonuclease in adaptive bacterial immunity.” Jinek M., et al., Science 337:816-821(2012), the entire contents of each of which are incorporated herein by reference). Cas9 orthologs have been described in various species, including, but not limited to, S. pyogenes, S. thermophiles, C. ulcerans, S. diphtheria, S. syrphidicola, P. intermedia, S. taiwanense, S. iniae, B. baltica, P. torquis, S. thermophiles, L. innocua, C. jejuni, and N. meningitidis. Additional suitable Cas9 nucleases and sequences will be apparent to those of skill in the art based on this disclosure, and such Cas9 nucleases and sequences include Cas9 sequences from the organisms and loci disclosed in Chylinski, Rhun, and Charpentier, “The tracrRNA and Cas9 families of type II CRISPR-Cas immunity systems” (2013) RNA Biology 10:5, 726-737; the entire contents of which are incorporated herein by reference.

[0050] The term “effective amount,” as used herein, refers to an amount of a biologically active agent that is sufficient to elicit a desired biological response. For example, in some embodiments, an effective amount of a base editor may refer to the amount of the base editor that is sufficient to edit a target site nucleotide sequence, e.g., a genome. In some embodiments, an effective amount of a base editor provided herein, e.g., of a fusion protein comprising a nuclease-inactive Cas9 domain and a nucleobase modification domain (e.g., an adenosine methyltransferase domain) may refer to the amount of the fusion protein that is sufficient to induce editing of a target site specifically bound and edited by the fusion protein. In some embodiments, an effective amount of a base editor provided herein may refer to the amount of the fusion protein sufficient to induce editing having the following characteristics: >50% product purity, <5% indels, and an editing window of 2-8 nucleotides. As will be appreciated by the skilled artisan, the effective amount of an agent, e.g., a fusion protein, a nuclease, an adenosine methyltransferase, a hybrid protein, a protein dimer, a complex of a protein (or protein dimer) and a polynucleotide, or a polynucleotide, may vary depending on various factors as, for example, on the desired biological response, e.g., on the specific allele, genome, or target site to be edited, on the target cell or tissue (i.e., the cell or tissue to be edited), and on the agent being used.

[0051] The term “evolved base editor” or “evolved base editor variant” refers to a base editor formed as a result of mutagenizing a reference or starting-point base editor. The term refers to embodiments in which the nucleobase modification domain is evolved or a separate domain is evolved. Mutagenizing a reference or starting-point base editor may comprise mutagenizing an adenosine methyltransferase—by a continuous evolution method (e.g., PACE), wherein the evolved adenosine methyltransferase has one or more amino acid variations introduced into its amino acid sequence relative to the amino acid sequence of the adenosine methyltransferase. Amino acid sequence variations may include one or more mutated residues within the amino acid sequence of a reference base editor, e.g., as a result of a change in the nucleotide sequence encoding the base editor that results in a change in the codon at any particular position in the coding sequence, the deletion of one or more amino acids (e.g., a truncated protein), the insertion of one or more amino acids, or any combination of the foregoing. The evolved base editor may include variants in one or more components or domains of the base editor (e.g., variants introduced into an adenosine methyltransferase domain, an iBER domain, or a variant introduced into combinations of these domains).

[0052] The term “fusion protein” as used herein refers to a hybrid polypeptide which comprises protein domains from at least two different proteins. One protein may be located at the amino-terminal (N-terminal) portion of the fusion protein or at the carboxy-terminal (C-terminal) protein thus forming an “amino-terminal fusion protein” or a “carboxy-terminal fusion protein,” respectively. A protein may comprise different domains, for example, a nucleic acid binding domain (e.g., the gRNA binding domain of Cas9 that directs the binding of the protein to a target site) and a nucleic acid cleavage domain or a catalytic domain of a nucleic-acid editing protein. Any of the proteins provided herein may be produced by any method known in the art. For example, the proteins provided herein may be produced via recombinant protein expression and purification, which is especially suited for fusion proteins comprising a peptide linker. Methods for recombinant protein expression and purification are well known, and include those described by Green and Sambrook, Molecular Cloning: A Laboratory Manual (4^{th} ed., Cold Spring Harbor Laboratory Press, Cold Spring Harbor, N.Y. (2012)), the entire contents of which are incorporated herein by reference.

[0053] The term “host cell,” as used herein, refers to a cell that can host, replicate, and transfer a phage vector useful for a continuous evolution process as provided herein. In embodiments where the vector is a viral vector, a suitable host cell is a cell that can be infected by the viral vector, can replicate it, and can package it into viral particles that can infect fresh host cells. A cell can host a viral vector if it supports expression of genes of viral vector, replication of the viral genome, and/or the generation of viral particles. One criterion to determine whether a cell is a suitable host cell for a given viral vector is to determine whether the cell can support the viral life cycle of a wild-type viral genome that the viral vector is derived from. For example, if the viral vector is a modified M13 phage genome, as provided in some embodiments described herein, then a suitable host cell would be any cell that can support the wild-type M13 phage life cycle. Suitable host cells for viral vectors useful in continuous evolution processes are well known to those of skill in the art, and the disclosure is not limited in this respect. In some embodiments, the viral vector is a phage and the host cell is a bacterial cell. In some embodiments, the host cell is an E. coli cell. Suitable E. coli host strains will be apparent to those of skill in the art, and include, but are not limited to, New England Biolabs (NEB) Turbo, Top10F′, DH12S, ER2738, ER2267, and XL1-Blue MRF′. These strain names are art recognized and the genotype of these strains has been well characterized. It should be understood that the above strains are exemplary only and are not limited in this respect. The term “fresh,” as used herein interchangeably with the terms “non-infected” or “uninfected” in the context of host cells, refers to a host cell that has not been infected by a viral vector comprising a gene of interest as used in a continuous evolution process provided herein. A fresh host cell can, however, have been infected by a viral vector unrelated to the vector to be evolved or by a vector of the same or a similar type but not carrying the gene of interest.

[0054] In some embodiments, the host cell is a prokaryotic cell, for example, a bacterial cell. In some embodiments, the host cell is an E. coli cell. In some embodiments, the host cell is a eukaryotic cell, for example, a yeast cell, an insect cell, or a mammalian cell. The type of host cell, will, of course, depend on the viral vector employed, and suitable host cell/viral vector combinations will be readily apparent to those of skill in the art.

[0055] In some PACE embodiments, for example, in embodiments employing an M13 selection phage, the host cells are E. coli cells expressing the Fertility factor, also commonly referred to as the F factor, sex factor, or F-plasmid. The F-factor is a bacterial DNA sequence that allows a bacterium to produce a sex pilus necessary for conjugation and is essential for the infection of E. coli cells with certain phage, for example, with M13 phage. For example, in some embodiments, the host cells for M13-PACE are of the genotype F′proA⁺B⁺ Δ(lacIZY) zzf::Tn10(TetR)/endA1 recA1 galE15 galK16 nupG rpsL ΔlacIZYA araD139 Δ(ara,leu)7697 mcrA Δ(mrr-hsdRMS-mcrBC) proBA::pir116λ.

[0056] The term “linker,” as used herein, refers to a chemical group or a molecule linking two molecules or domains, e.g., nCas9 and an adenosine methyltransferase or adenosine methyltransferase. In some embodiments, a linker joins a dCas9 and modification domain (e.g., an adenosine methyltransferase). Typically, the linker is positioned between, or flanked by, two groups, molecules, or other domains and connected to each one via a covalent bond, thus connecting the two. In some embodiments, the linker is an amino acid or a plurality of amino acids (e.g., a peptide or protein). In some embodiments, the linker is an organic molecule, group, polymer, or chemical domain. Chemical domains include, but are not limited to, disulfide, hydrazone, thiol and azo domains. In some embodiments, the linker is 5-100 amino acids in length, for example, 5, 6, 7, 8, 9, 10, 11, 12, 13, 14, 15, 16, 17, 18, 19, 20, 21, 22, 23, 24, 25, 26, 27, 28, 29, 30, 30-35, 35-40, 40-45, 45-50, 50-60, 60-70, 70-80, 80-90, 90-100, 100-150, or 150-200 amino acids in length. Longer or shorter linkers are also contemplated.

[0057] The term “mutation,” as used herein, refers to a substitution of a residue within a sequence, e.g., a nucleic acid or amino acid sequence, with another residue; a deletion or insertion of one or more residues within a sequence; or a substitution of a residue within a sequence of a genome in a subject to be corrected. Mutations are typically described herein by identifying the original residue followed by the position of the residue within the sequence and by the identity of the newly substituted residue. Various methods for making the amino acid substitutions (mutations) provided herein are well known in the art, and are provided by, for example, Green and Sambrook, Molecular Cloning: A Laboratory Manual (4^{th} ed., Cold Spring Harbor Laboratory Press, Cold Spring Harbor, N.Y. (2012)). Mutations can include a variety of categories, such as single base polymorphisms, microduplication regions, indel, and inversions, and is not meant to be limiting in any way. Mutations can include “loss-of-function”mutations which is the normal result of a mutation that reduces or abolishes a protein activity. Most loss-of-function mutations are recessive, because in a heterozygote the second chromosome copy carries an unmutated version of the gene coding for a fully functional protein whose presence compensates for the effect of the mutation. There are some exceptions where a loss-of-function mutation is dominant, one example being haploinsufficiency, where the organism is unable to tolerate the approximately 50% reduction in protein activity suffered by the heterozygote. This is the explanation for a few genetic diseases in humans, including Marfan syndrome which results from a mutation in the gene for the connective tissue protein called fibrillin. Mutations also embrace “gain-of-function” mutations, which is one which confers an abnormal activity on a protein or cell that is otherwise not present in a normal condition. Many gain-of-function mutations are in regulatory sequences rather than in coding regions, and can therefore have a number of consequences. For example, a mutation might lead to one or more genes being expressed in the wrong tissues, these tissues gaining functions that they normally lack. Alternatively the mutation could lead to overexpression of one or more genes involved in control of the cell cycle, thus leading to uncontrolled cell division and hence to cancer. Because of their nature, gain-of-function mutations are usually dominant.

[0058] The terms “non-naturally occurring” or “engineered” are used interchangeably and indicate the involvement of the hand of man. The terms, when referring to nucleic acid molecules or polypeptides (e.g., Cas9 or adenosine methyltransferases) mean that the nucleic acid molecule or the polypeptide is at least substantially free from at least one other component with which they are naturally associated in nature and/or as found in nature (e.g., an amino acid sequence not found in nature).

[0059] The term “nucleic acid,” as used herein, refers to RNA as well as single and/or double-stranded DNA. Nucleic acids may be naturally occurring, for example, in the context of a genome, a transcript, an mRNA, tRNA, rRNA, siRNA, snRNA, a plasmid, cosmid, chromosome, chromatid, or other naturally occurring nucleic acid molecule. On the other hand, a nucleic acid molecule may be a non-naturally occurring molecule, e.g., a recombinant DNA or RNA, an artificial chromosome, an engineered genome, or fragment thereof, or a synthetic DNA, RNA, DNA/RNA hybrid, or including non-naturally occurring nucleotides or nucleosides. Furthermore, the terms “nucleic acid,” “DNA,” “RNA,” and/or similar terms include nucleic acid analogs, e.g., analogs having other than a phosphodiester backbone. Nucleic acids can be purified from natural sources, produced using recombinant expression systems and optionally purified, chemically synthesized, etc. Where appropriate, e.g., in the case of chemically synthesized molecules, nucleic acids can comprise nucleoside analogs such as analogs having chemically modified bases or sugars, and backbone modifications. A nucleic acid sequence is presented in the 5′ to 3′ direction unless otherwise indicated. In some embodiments, a nucleic acid is or comprises natural nucleosides (e.g. adenosine, thymidine, guanosine, cytidine, uridine, deoxyadenosine, deoxythymidine, deoxyguanosine, and deoxycytidine); nucleoside analogs (e.g., 2-aminoadenosine, 2-thiothymidine, inosine, pyrrolo-pyrimidine, 3-methyl adenosine, 5-methylcytidine, 2-aminoadenosine, C5-bromouridine, C5-fluorouridine, C5-iodouridine, C5-propynyl-uridine, C5-propynyl-cytidine, C5-methylcytidine, 2-aminoadenosine, 7-deazaadenosine, 7-deazaguanosine, 8-oxoadenine, 8-oxoguanosine, 0(6)-methylguanine, and 2-thiocytidine); chemically modified bases; biologically modified bases (e.g., methylated bases); intercalated bases; modified sugars (e.g., 2′-fluororibose, ribose, 2′-deoxyribose, arabinose, and hexose); and/or modified phosphate groups (e.g., phosphorothioates and 5′-N-phosphoramidite linkages).

[0060] The term “nucleic acid programmable D/RNA binding protein (napR/DNAbp)” refers to any protein that may associate (e.g., form a complex) with one or more nucleic acid molecules (i.e., which may broadly be referred to as a “napR/DNAbp-programming nucleic acid molecule” and includes, for example, guide RNA in the case of Cas systems) which direct or otherwise program the protein to localize to a specific target nucleotide sequence (e.g., a gene locus of a genome) that is complementary to the one or more nucleic acid molecules (or a portion or region thereof) associated with the protein, thereby causing the protein to bind to the nucleotide sequence at the specific target site. This term napR/DNAbp embraces CRISPR Cas9 proteins, as well as Cas9 equivalents, homologs, orthologs, or paralogs, whether naturally occurring or non-naturally occurring (e.g., engineered or modified), and may include a Cas9 equivalent from any type of CRISPR system (e.g., type II, V, VI), including Cpf1 (a type-V CRISPR-Cas systems), C2c1 (a type V CRISPR-Cas system), C2c2 (a type VI CRISPR-Cas system), C2c3 (a type V CRISPR-Cas system), dCas9, GeoCas9, CjCas9, Cas12a, Cas12b, Cas12c, Cas12d, Cas12g, Cas12h, Cas12i, Cas13b, Cas13c, Cas13d, Cas14, Csn2, Argonaute (Ago), and nCas9. The term also embraces Cas homologs and variants such as an xCas9, an SpCas9-NG, an LbCas12a, an AsCas12a, a Cas9-KKH, a circularly permuted Cas9, a SmacCas9, a Spy-macCas9. Further Cas-equivalents are described in Makarova et al., “C2c2 is a single-component programmable RNA-guided RNA-targeting CRISPR effector,” Science 2016; 353 (6299), the contents of which are incorporated herein by reference. However, the nucleic acid programmable DNA binding protein (napDNAbp) of the disclosure are not limited to CRISPR-Cas systems. The disclosure embraces any such programmable protein, such as the Argonaute protein from Natronobacterium gregoryi (NgAgo) which may also be used for DNA-guided genome editing. NgAgo-guide DNA system does not require a PAM sequence or guide RNA molecules, which means genome editing can be performed simply by the expression of generic NgAgo protein and introduction of synthetic oligonucleotides on any genomic sequence. See Gao et al., DNA-guided genome editing using the Natronobacterium gregoryi Argonaute. Nature Biotechnology 2016; 34(7):768-73, which is incorporated herein by reference.

[0061] In some embodiments, the napR/DNAbp is a RNA-programmable nuclease, when in a complex with an RNA, may be referred to as a nuclease:RNA complex. Typically, the bound RNA(s) is referred to as a guide RNA (gRNA). gRNAs can exist as a complex of two or more RNAs, or as a single RNA molecule. gRNAs that exist as a single RNA molecule may be referred to as single-guide RNAs (sgRNAs), though “gRNA” is used interchangeabley to refer to guide RNAs that exist as either single molecules or as a complex of two or more molecules. Typically, gRNAs that exist as single RNA species comprise two domains: (1) a domain that shares homology to a target nucleic acid (e.g., and directs binding of a Cas9 (or equivalent) complex to the target); and (2) a domain that binds a Cas9 protein. In some embodiments, domain (2) corresponds to a sequence known as a tracrRNA, and comprises a stem-loop structure. For example, in some embodiments, domain (2) is homologous to a tracrRNA as depicted in FIG. 1E of Jinek et al., Science 337:816-821(2012), the entire contents of which is incorporated herein by reference. Other examples of gRNAs (e.g., those including domain 2) can be found in U.S. Pat. No. 9,340,799, entitled “mRNA-Sensing Switchable gRNAs,” and International Patent Application No. PCT/US2014/054247, filed Sep. 6, 2013, published as WO 2015/035136 and entitled “Delivery System For Functional Nucleases,” the entire contents of each are herein incorporated by reference. In some embodiments, a gRNA comprises two or more of domains (1) and (2), and may be referred to as an “extended gRNA.” For example, an extended gRNA will, e.g., bind two or more Cas9 proteins and bind a target nucleic acid at two or more distinct regions, as described herein. The gRNA comprises a nucleotide sequence that complements a target site, which mediates binding of the nuclease/RNA complex to said target site, providing the sequence specificity of the nuclease:RNA complex. In some embodiments, the RNA-programmable nuclease is the (CRISPR-associated system) Cas9 endonuclease, for example Cas9 (Csn1) from Streptococcus pyogenes (see, e.g., “Complete genome sequence of an M1 strain of Streptococcus pyogenes.” Ferretti J. J. et al., Proc. Natl. Acad. Sci. U.S.A. 98:4658-4663(2001); “CRISPR RNA maturation by trans-encoded small RNA and host factor RNase III.” Deltcheva E. et al., Nature 471:602-607(2011); and “A programmable dual-RNA-guided DNA endonuclease in adaptive bacterial immunity.” Jinek M. et al., Science 337:816-821(2012), the entire contents of each of which are incorporated herein by reference.

[0062] The napR/DNAbp nucleases (e.g., Cas9) use RNA:DNA hybridization to target DNA cleavage sites, these proteins are able to be targeted, in principle, to any sequence specified by the guide RNA. Methods of using napR/DNAbp nucleases, such as Cas9, for site-specific cleavage (e.g., to modify a genome) are known in the art (see e.g., Cong, L. et al. Multiplex genome engineering using CRISPR/Cas systems. Science 339, 819-823 (2013); Mali, P. et al. RNA-guided human genome engineering via Cas9. Science 339, 823-826 (2013); Hwang, W. Y. et al. Efficient genome editing in zebrafish using a CRISPR-Cas system. Nature Biotechnology 31, 227-229 (2013); Jinek, M. et al. RNA-programmed genome editing in human cells. eLife 2, e00471 (2013); Dicarlo, J. E. et al., Genome engineering in Saccharomyces cerevisiae using CRISPR-Cas systems. Nucleic Acid Res. (2013); Jiang, W. et al. RNA-guided editing of bacterial genomes using CRISPR-Cas systems. Nature Biotechnology 31, 233-239 (2013); the entire contents of each of which are incorporated herein by reference).

[0063] The term “napR/DNAbp-programming nucleic acid molecule” or equivalently “guide sequence” refers the one or more nucleic acid molecules which associate with and direct or otherwise program a napR/DNAbp protein to localize to a specific target nucleotide sequence (e.g., a gene locus of a genome) that is complementary to the one or more nucleic acid molecules (or a portion or region thereof) associated with the protein, thereby causing the napR/DNAbp protein to bind to the nucleotide sequence at the specific target site. A non-limiting example is a guide RNA of a Cas protein of a CRISPR-Cas genome editing system.

[0064] A nuclear localization signal or sequence (NLS) is an amino acid sequence that tags, designates, or otherwise marks a protein for import into the cell nucleus by nuclear transport. Typically, this signal consists of one or more short sequences of positively charged lysines or arginines exposed on the protein surface. Different nuclear localized proteins may share the same NLS. An NLS has the opposite function of a nuclear export signal (NES), which targets proteins out of the nucleus. Thus, a single nuclear localization signal can direct the entity with which it is associated to the nucleus of a cell. Such sequences can be of any size and composition, for example more than 25, 25, 15, 12, 10, 8, 7, 6, 5 or 4 amino acids, but will preferably comprise at least a four to eight amino acid sequence known to function as a nuclear localization signal (NLS).

[0065] The term, as used herein, “nucleobase modification domain” or “modification domain” embraces any protein, enzyme, or polypeptide (or functional fragment thereof) which is capable of modifying a DNA or RNA molecule. Nucleobase modification domains may be naturally occurring, or may be engineered. For example, a nucleobase modification domain can include one or more DNA repair enzymes, for example, and an enzyme or protein involved in base excision repair (BER), nucleotide excision repair (NER), homology-dependent recombinational repair (HR), non-homologous end-joining repair (NHEJ), microhomology end-joining repair (MMEJ), mismatch repair (MMR), direct reversal repair, or other known DNA repair pathway. A nucleobase modification domain can have one or more types of enzymatic activities, including, but not limited to, endonuclease activity, polymerase activity, ligase activity, replication activity, and proofreading activity. Nucleobase modification domains can also include DNA or RNA-modifying enzymes and/or mutagenic enzymes, such as DNA methylating enzymes (i.e., adenosine methyltransferases), which covalently modify nucleobases leading in some cases to mutagenic corrections by way of normal cellular DNA repair and replication processes. Exemplary nucleobase modification domains include, but are not limited to, an adenosine methyltransferase, a nuclease, a nickase, a recombinase, a methyltransferase, a methylase, an acetylase, an acetyltransferase, a transcriptional activator, or a transcriptional repressor domain. In some embodiments the nucleobase modification domain is an adenosine methyltransferase (e.g., AlkBH1).

[0066] As used herein, the terms “oligonucleotide” and “polynucleotide” can be used interchangeably to refer to a polymer of nucleotides (e.g., a string of at least three nucleotides).

[0067] The term “phage-assisted continuous evolution (PACE),” as used herein, refers to continuous evolution that employs phage as viral vectors. The general concept of PACE technology has been described, for example, in International PCT Application, PCT/US2009/056194, filed Sep. 8, 2009, published as WO 2010/028347 on Mar. 11, 2010; International PCT Application, PCT/US2011/066747, filed Dec. 22, 2011, published as WO 2012/088381 on Jun. 28, 2012; U.S. Pat. No. 9,023,594, issued May 5, 2015; U.S. Pat. No. 9,771,574, issued Sep. 26, 2017; U.S. Pat. No. 9,394,537, issued Jul. 19, 2016; International PCT Application, PCT/US2015/012022, filed Jan. 20, 2015, published as WO 2015/134121 on Sep. 11, 2015; U.S. Pat. No. 10,179,911, issued Jan. 15, 2019; U.S. Pat. No. 10,179,911, issued Jan. 15, 2019; International PCT Application, PCT/US2016/027795, filed Apr. 15, 2016, published as WO 2016/168631 on Oct. 20, 2016, and International Patent Publication WO 2019/023680, published Jan. 31, 2019, the entire contents of each of which are incorporated herein by reference.

[0068] The term “phage-assisted non-continuous evolution (PANCE),” as used herein, refers to non-continuous evolution that employs phage as viral vectors. The general concept of PANCE technology has been described, for example, in Suzuki T. et al., Crystal structures reveal an elusive functional domain of pyrrolysyl-tRNA synthetase, Nat Chem Biol. 13(12): 1261-1266 (2017), incorporated herein by reference in its entirety. Briefly, PANCE is a simplified technique for rapid in vivo directed evolution using serial flask transfers of evolving ‘selection phage’ (SP), which contain a gene of interest to be evolved, across fresh E. coli host cells, thereby allowing genes inside the host E. coli to be held constant while genes contained in the SP continuously evolve. Following phage growth, an aliquot of infected cells is used to transfect a subsequent flask containing host E. coli. This process is continued until the desired phenotype is evolved, for as many transfers as required. Serial flask transfers have long served as a widely-accessible approach for laboratory evolution of microbes, and, more recently, analogous approaches have been developed for bacteriophage evolution. The PANCE system features lower stringency than the PACE system.

[0069] The term “promoter” is art-recognized and refers to a nucleic acid molecule with a sequence recognized by the cellular transcription machinery and able to initiate transcription of a downstream gene. A promoter can be constitutively active, meaning that the promoter is always active in a given cellular context, or conditionally active, meaning that the promoter is only active in the presence of a specific condition. For example, a conditional promoter may only be active in the presence of a specific protein that connects a protein associated with a regulatory element in the promoter to the basic transcriptional machinery, or only in the absence of an inhibitory molecule. A subclass of conditionally active promoters are inducible promoters that require the presence of a small molecule “inducer” for activity. Examples of inducible promoters include, but are not limited to, arabinose-inducible promoters, Tet-on promoters, and tamoxifen-inducible promoters. A variety of constitutive, conditional, and inducible promoters are well known to the skilled artisan, and the skilled artisan will be able to ascertain a variety of such promoters useful in carrying out the present disclosure, which is not limited in this respect. In various embodiments, the specification provides vectors with appropriate promoters for driving expression of the nucleic acid sequences encoding the base editor fusion proteins (or one or more individual components thereof).

[0070] The term “phage,” as used herein interchangeably with the term “bacteriophage,” refers to a virus that infects bacterial cells. Typically, phages consist of an outer protein capsid enclosing genetic material. The genetic material may be ssRNA, dsRNA, ssDNA, or dsDNA, in either linear or circular form. Phages and phage vectors are well known to those of skill in the art and non-limiting examples of phages that are useful for carrying out the methods provided herein are k, T2, T4, T7, T12, R17, M13, MS2, G4, P1, P2, P4, Phi X174, N4, 16, and (1)29. In certain embodiments, the phage utilized in the present disclosure is M13. Additional suitable phages and host cells will be apparent to those of skill in the art and the disclosure is not limited in this aspect. For an exemplary description of additional suitable phages and host cells, see Elizabeth Kutter and Alexander Sulakvelidze: Bacteriophages: Biology and Applications. CRC Press; 1st edition (December 2004), ISBN: 0849313368; Martha R. J. Clokie and Andrew M. Kropinski: Bacteriophages: Methods and Protocols, Volume 1: Isolation, Characterization, and Interactions (Methods in Molecular Biology) Humana Press; 1st edition (December, 2008), ISBN: 1588296822; Martha R. J. Clokie and Andrew M. Kropinski: Bacteriophages: Methods and Protocols, Volume 2: Molecular and Applied Embodiments (Methods in Molecular Biology) Humana Press; 1st edition (December 2008), ISBN: 1603275649; all of which are incorporated herein in their entirety by reference for disclosure of suitable phages and host cells as well as methods and protocols for isolation, culture, and manipulation of such phages).

[0071] The terms “protein,” “peptide,” and “polypeptide” are used interchangeably herein, and refer to a polymer of amino acid residues linked together by peptide (amide) bonds. The terms refer to a protein, peptide, or polypeptide of any size, structure, or function. Typically, a protein, peptide, or polypeptide will be at least three amino acids long. A protein, peptide, or polypeptide may refer to an individual protein or a collection of proteins. One or more of the amino acids in a protein, peptide, or polypeptide may be modified, for example, by the addition of a chemical entity such as a carbohydrate group, a hydroxyl group, a phosphate group, a farnesyl group, an isofarnesyl group, a fatty acid group, a linker for conjugation, functionalization, or other modification, etc. A protein, peptide, or polypeptide may also be a single molecule or may be a multi-molecular complex. A protein, peptide, or polypeptide may be just a fragment of a naturally occurring protein or peptide. A protein, peptide, or polypeptide may be naturally occurring, engineered, or synthetic, or any combination thereof. The term “fusion protein” as used herein refers to a hybrid polypeptide which comprises protein domains from at least two different proteins. One protein may be located at the amino-terminal (N-terminal) portion of the fusion protein or at the carboxy-terminal (C-terminal) protein thus forming an “amino-terminal fusion protein” or a “carboxy-terminal fusion protein,” respectively. A protein may comprise different domains, for example, a nucleic acid binding domain (e.g., the gRNA binding domain of Cas9 that directs the binding of the protein to a target site) and a nucleic acid cleavage domain or a catalytic domain of a recombinase. In some embodiments, a protein comprises a proteinaceous part, e.g., an amino acid sequence constituting a nucleic acid binding domain, and an organic compound, e.g., a compound that can act as a nucleic acid cleavage agent. In some embodiments, a protein is in a complex with, or is in association with, a nucleic acid, e.g., RNA. Any of the proteins provided herein may be produced by any method known in the art. For example, the proteins provided herein may be produced via recombinant protein expression and purification, which is especially suited for fusion proteins comprising a peptide linker. Methods for recombinant protein expression and purification are well known, and include those described by Green and Sambrook, Molecular Cloning: A Laboratory Manual (4th ed., Cold Spring Harbor Laboratory Press, Cold Spring Harbor, N.Y. (2012)), the entire contents of which are incorporated herein by reference.

[0072] The term “recombinant” as used herein in the context of proteins or nucleic acids refers to proteins or nucleic acids that do not occur in nature, but are the product of human engineering. For example, in some embodiments, a recombinant protein or nucleic acid molecule comprises an amino acid or nucleotide sequence that comprises at least one, at least two, at least three, at least four, at least five, at least six, or at least seven mutations as compared to any naturally occurring sequence.

[0073] The term “subject,” as used herein, refers to an individual organism, for example, an individual mammal. In some embodiments, the subject is a human. In some embodiments, the subject is a non-human mammal. In some embodiments, the subject is a non-human primate. In some embodiments, the subject is a rodent. In some embodiments, the subject is a sheep, a goat, a cattle, a cat, or a dog. In some embodiments, the subject is a vertebrate, an amphibian, a reptile, a fish, an insect, a fly, or a nematode. In some embodiments, the subject is a research animal. In some embodiments, the subject is an experimental organism. In some embodiments, the subject is a plant. In some embodiments, the subject is genetically engineered, e.g., a genetically engineered non-human subject. The subject may be of either sex and at any stage of development.

[0074] The term “target site” refers to a sequence within a nucleic acid molecule that is edited by a base editor (e.g., a dCas9-adenosine methyltransferase fusion protein provided herein). The target site further refers to the sequence within a nucleic acid molecule to which a complex of the base editor and gRNA binds.

[0075] The term “vector,” as used herein, may refer to a nucleic acid that has been modified to encode a gene of interest and that is able to enter into a host cell, mutate and replicate within the host cell, and then transfer a replicated form of the vector into another host cell. Alternatively, the term “vector” as used herein may refer to a nucleic acid that has been modified to encode the base editor. Exemplary suitable vectors include viral vectors, such as retroviral vectors or bacteriophages and filamentous phage, and conjugative plasmids.

[0076] The term “viral particle,” as used herein, refers to a viral genome, for example, a DNA or RNA genome, that is associated with a coat of a viral protein or proteins, and, in some cases, with an envelope of lipids. For example, a phage particle comprises a phage genome packaged into a protein encoded by the wild type phage genome.

[0077] The term “viral vector,” as used herein, refers to a nucleic acid comprising a viral genome that, when introduced into a suitable host cell, can be replicated and packaged into viral particles able to transfer the viral genome into another host cell. The term “viral vector” extends to vectors comprising truncated or partial viral genomes. For example, in some embodiments, a viral vector is provided that lacks a gene encoding a protein essential for the generation of infectious viral particles. In suitable host cells, for example, host cells comprising the lacking gene under the control of a conditional promoter, however, such truncated viral vectors can replicate and generate viral particles able to transfer the truncated viral genome into another host cell. In some embodiments, the viral vector is an adeno-associated virus (AAV) vector.

[0078] The terms “treatment,” “treat,” and “treating,” refer to a clinical intervention aimed to reverse, alleviate, delay the onset of, or inhibit the progress of a disease, disorder, or condition, or one or more symptoms thereof, as described herein. As used herein, the terms “treatment,” “treat,” and “treating” refer to a clinical intervention aimed to reverse, alleviate, delay the onset of, or inhibit the progress of a disease, disorder, or condition, or one or more symptoms thereof, as described herein. In some embodiments, treatment may be administered after one or more symptoms have developed and/or after a disease has been diagnosed. In other embodiments, treatment may be administered in the absence of symptoms, e.g., to prevent or delay onset of a symptom or inhibit onset or progression of a disease. For example, treatment may be administered to a susceptible individual prior to the onset of symptoms (e.g., in light of a history of symptoms and/or in light of genetic or other susceptibility factors). Treatment may also be continued after symptoms have resolved, for example, to prevent or delay their prevention or recurrence.

[0079] As used herein, the term “variant” refers to a protein having characteristics that deviate from what occurs in nature that retains at least one functional i.e. binding, interaction, or enzymatic activity and/or therapeutic property thereof. A “variant” is at least about 70% identical, at least about 80% identical, at least about 90% identical, at least about 95% identical, at least about 96% identical, at least about 97% identical, at least about 98% identical, at least about 99% identical, at least about 99.5% identical, or at least about 99.9% identical to the wild type protein. For instance, a variant of Cas9 may comprise a Cas9 that has one or more changes in amino acid residues as compared to a wild type Cas9 amino acid sequence. As another example, a variant of a deaminase may comprise a deaminase that has one or more changes in amino acid residues as compared to a wild type deaminase amino acid sequence, e.g. following ancestral sequence reconstruction of the deaminase. These changes include chemical modifications, substitutions of different amino acid residues truncations, covalent additions (e.g. of a tag), and any other changes. This term also embraces fragments of a wild type protein.

[0080] The level or degree of which the property is retained may be reduced relative to the wild type protein but is typically the same or similar in kind. Generally, variants are overall very similar, and in many regions, identical to the amino acid sequence of the protein described herein. A skilled artisan will appreciate how to make and use variants that maintain all, or at least some, of a functional ability or property.

[0081] The variant proteins may comprise, or alternatively consist of, an amino acid sequence which is at least 80%, 85%, 90%, 95%, 96%, 97%, 98%, 99%, or 100%, identical to, for example, the amino acid sequence of a wild-type protein, or any protein provided herein. Further polypeptides encompassed by the invention are polypeptides encoded by polynucleotides which hybridize to the complement of a nucleic acid molecule encoding a protein such as a napDNAbp under stringent hybridization conditions (e.g. hybridization to filter bound DNA in 6× Sodium chloride/Sodium citrate (SSC) at about 45 degrees Celsius, followed by one or more washes in 0.2.times.SSC, 0.1% SDS at about 50-65 degrees Celsius), under highly stringent conditions (e.g. hybridization to filter bound DNA in 6× sodium chloride/Sodium citrate (SSC) at about 45 degrees Celsius, followed by one or more washes in 0.1×SSC, 0.2% SDS at about 68 degrees Celsius), or under other stringent hybridization conditions which are known to those of skill in the art (see, for example, Ausubel, F. M. et al., eds., 1989 Current Protocol in Molecular Biology, Green publishing associates, Inc., and John Wiley & Sons Inc., New York, at pp. 6.3.1-6.3.6 and 2.10.3).

[0082] By a polypeptide having an amino acid sequence at least, for example, 95% “identical” to a query amino acid sequence, it is intended that the amino acid sequence of the subject polypeptide is identical to the query sequence except that the subject polypeptide sequence may include up to five amino acid alterations per each 100 amino acids of the query amino acid sequence. In other words, to obtain a polypeptide having an amino acid sequence at least 95% identical to a query amino acid sequence, up to 5% of the amino acid residues in the subject sequence may be inserted, deleted, or substituted with another amino acid. These alterations of the reference sequence may occur at the amino- or carboxy-terminal positions of the reference amino acid sequence or anywhere between those terminal positions, interspersed either individually among residues in the reference sequence or in one or more contiguous groups within the reference sequence.

[0083] As a practical matter, whether any particular polypeptide is at least 80%, 85%, 90%, 95%, 96%, 97%, 98%, or 99% identical to, for instance, the amino acid sequence of a protein such as a napDNAbp, can be determined conventionally using known computer programs. A preferred method for determining the best overall match between a query sequence (a sequence of the present invention) and a subject sequence, also referred to as a global sequence alignment, can be determined using the FASTDB computer program based on the algorithm of Brutlag et al. (Comp. App. Biosci. 6:237-245 (1990)). In a sequence alignment the query and subject sequences are either both nucleotide sequences or both amino acid sequences. The result of said global sequence alignment is expressed as percent identity. Preferred parameters used in a FASTDB amino acid alignment are: Matrix=PAM 0, k-tuple=2, Mismatch Penalty=1, Joining Penalty=20, Randomization Group Length=0, Cutoff Score=1, Window Size=sequence length, Gap Penalty=5, Gap Size Penalty=0.05, Window Size=500 or the length of the subject amino acid sequence, whichever is shorter.

[0084] If the subject sequence is shorter than the query sequence due to N- or C-terminal deletions, not because of internal deletions, a manual correction must be made to the results. This is because the FASTDB program does not account for N- and C-terminal truncations of the subject sequence when calculating global percent identity. For subject sequences truncated at the N- and C-termini, relative to the query sequence, the percent identity is corrected by calculating the number of residues of the query sequence that are N- and C-terminal of the subject sequence, which are not matched/aligned with a corresponding subject residue, as a percent of the total bases of the query sequence. Whether a residue is matched/aligned is determined by results of the FASTDB sequence alignment. This percentage is then subtracted from the percent identity, calculated by the above FASTDB program using the specified parameters, to arrive at a final percent identity score. This final percent identity score is what is used for the purposes of the present invention. Only residues to the N- and C-termini of the subject sequence, which are not matched/aligned with the query sequence, are considered for the purposes of manually adjusting the percent identity score. That is, only query residue positions outside the farthest N- and C-terminal residues of the reference sequence.

[0085] As used herein the term “wild type” is a term of the art understood by skilled persons and means the typical form of an organism, strain, gene or characteristic as it occurs in nature as distinguished from mutant or variant forms.

### DETAILED DESCRIPTION OF CERTAIN EMBODIMENTS

[0086] The present inventors have developed adenine-to-thymine or “ATBE” (or thymine-to-adenine or “TABE) transversion base editors which comprise a napDNAbp (e.g., a dCas9 domain) fused to a nucleobase modification domain. The nucleobase modification domain comprises an adenosine methyltransferase. The ATBE transversion base editors are capable of converting an A:T nucleobase pair to a T:A nucleobase pair in a target nucleotide sequence of interest, e.g., the genome of a cell. The disclosed base editors comprise an engineered methyltransferase variant that catalyzes the conversion of a target adenine to a thymine via an alkylation reaction.

[0087] The disclosed base editors also comprise TABE transversion base editors that comprise an engineered methyltransferase variant that catalyzes the conversion of a target adenine to a thymine via an alkylation reaction, wherein the base-paired thymine of the non-edited (i.e. non-alkylated) strand is subsequently converted to a adenine by the concerted action of the cell's mismatch repair factors.

[0088] In the methods of the present disclosure, a targeted A in a nucleic acid of interest is first enzymatically methylated to an N1-methyladenosine. N1-methyladenosine disrupts the hydrogen bonding interactions with the base-paired thymine of the unmutated strand. Without wishing to be bound by any particular theory, the cell's replication machinery interprets the methylated adenine as a thymine, and converts the mismatched thymine to an adenine. During a subsequent round of replication or mismatch repair, the methylated adenine is converted to a thymine. A desired A-to-T transversion is thus achieved. Adenine methylation is achieved by the targeted use of a fusion protein comprising a Cas9 (e.g., dCas9 or nCas9) domain, an adenosine methyltransferase domain, and optionally linkers interconnecting these domains (see FIG. 1A).

[0089] The adenosine methyltransferase domains of the disclosed base editors may comprise variants of wild-type alkyltransferase enzymes. These variants may comprise an amino acid sequence that is at least about 70% identical, at least about 80% identical, at least about 90% identical, at least about 95% identical, at least about 96% identical, at least about 97% identical, at least about 98% identical, at least about 99% identical, at least about 99.5% identical, or at least about 99.9% identical to the wild type enzyme. In some embodiments, the adenosine methyltransferase domains may comprise an amino acid sequence having 1, 2, 3, 4, 5, 6, 7, 8, 9, 10, 11, 12, 13, 14, 15, 16, 17, 18, 19, 20, 25, 30, or more than 30 amino acids that differ relative to the amino acid sequence of the wild type enzyme. These differences may comprise nucleotides that have been inserted, deleted, or substituted relative to the amino acid sequence of the wild type enzyme. In some embodiments, the adenosine methyltransferase domains contain stretches of about 50, about 75, about 100, about 125, about 150, about 175, about 200, about 300, about 400, about 500, or more than 500 consecutive amino acids in common with the wild type enzyme. In some embodiments, the adenosine methyltransferase domains comprise truncations at the N-terminus or C-terminus relative to the wild-type enzyme. In some embodiments, the adenosine methyltransferase domains comprise truncations of 1, 2, 3, 4, 5, 6, 7, 8, 9, 10, 11, 12, 13, 14, 15, 16, 17, 18, 19, 20, 25, 30, or more than 30 amino acids at the N-terminus or C-terminus relative to the wild-type or base sequence.

[0090] In various embodiments of the base editor fusion proteins, the adenosine methyltransferase is a wild-type adenosine methyltransferase. In certain embodiments, the adenosine methyltransferase is a wild-type complex (or heterodimer) of subunits TRMT6 and TRMT61A (“TRMT6/61A”), or a variant thereof, which methylates an adenosine in a nucleic acid. In certain embodiments, the TRMT6/61A is a human TRMT6/61A, or a variant thereof. In certain embodiments, the subunits of the TRMT6/61A, or a variant thereof, are connected by a linker.

[0091] In certain embodiments, the adenosine methyltransferase methylates an adenosine to N1-methyladenosine. In various embodiments, the methyltransferase is a TRM, or a variant thereof, which methylates an adenosine in nucleic acid. In certain embodiments, the methyltransferase is a Saccharomyces cerevisiae TRM61 or Saccharomyces cerevisiae TRM61/TRM6 or a variant thereof. In certain embodiments, the methyltransferase is a human TRMT6/61A, TRMT61B, TRMT10C, or a variant thereof. In various embodiments, the methyltransferase is an Escherichia coli TRM6/61A, Escherichia coli TrmD, M. jannaschii Trm5b or P. abyssi Trm5b, or a variant thereof.

[0092] The present disclosure provides for A:T to T:A transversion base editors which satisfy a need in the art for the installation of targeted transversions in a target nucleotide sequence, e.g., a genome. In particular, the present disclosure provides A:T to T:A base editors (e.g., fusion proteins comprising a dCas9 domain and an adenosine methyltransferase domain) which satisfy a need in the art for effecting targeted transversions, particularly A:T to T:A transversions. In addition, the disclosure provides compositions comprising the transversion base editors as described herein, e.g., fusion proteins comprising a dCas9 domain and an adenosine methyltransferase domain. In addition, the present disclosure provides for nucleic acid molecules encoding and/or expressing the transversion base editors as described herein, as well as expression vectors and constructs for expressing the transversion base editors described herein, host cells comprising said nucleic acid molecules and expression vectors, and compositions for delivering and/or administering nucleic acid-based embodiments described herein.

[0093] Still further, the present disclosure provides for methods of making the transversion base editors, as well as methods of using the transversion base editors or nucleic acid molecules encoding the transversion base editors in applications including editing a nucleic acid molecule, e.g., a genome. In certain embodiments, methods of engineering the transversion base editors provided herein is a phage-assisted continuous evolution (PACE) system or non-continuous system (e.g., PANCE) which may be utilized to evolve one or more components of a base editor (e.g., a Cas9 domain or an adenosine methyltransferase domain). In certain embodiments, following the successful evolution of the one or more components of the transversion base editor, methods of making the base editors comprise recombinant protein expression methodologies known to one of ordinary skill in the art.

[0094] The specification also provides methods for editing a target nucleic acid molecule, e.g., a single nucleobase within a genome, with a base editing system described herein (e.g., in the form of an evolved base editor as described herein, or a vector or construct encoding same). Such methods involve transducing (e.g., via transfection) cells with a plurality of complexes each comprising a fusion protein (e.g., a fusion protein comprising a Cas9 nickase (nCas9) domain and an adenosine methyltransferase domain) and a gRNA molecule. In some embodiments, the gRNA is bound to the napDNAbp domain (e.g., nCas9 domain) of the fusion protein. In some embodiments, each gRNA comprises a guide sequence of at least 10 contiguous nucleotides (e.g., 10, 11, 12, 13, 14, 15, 16, 17, 18, 19, 20, 21, 22, 23, 24, 25, 26, 27, 28, 29, or 30 contiguous nucleotides) that is complementary to a target sequence. In certain embodiments, the methods involve the transfection of nucleic acid constructs (e.g., plasmids) that each (or together) encode the components of a complex of fusion protein and gRNA molecule.

[0095] In certain embodiments of the disclosed methods, a nucleic acid construct that encodes the fusion protein is transfected into the cell separately from the plasmid that encodes the gRNA molecule. In certain embodiments, these components are encoded on a single construct and transfected together.

[0096] In other embodiments, the methods disclosed herein involve the introduction into cells of a complex comprising a fusion protein and gRNA molecule that has been expressed and cloned outside of these cells.

[0097] It should be appreciated that any fusion protein, e.g., any of the fusion proteins provided herein, may be introduced into the cell in any suitable way, either stably or transiently. In some embodiments, a fusion protein may be transfected into the cell. In some embodiments, the cell may be transduced or transfected with a nucleic acid construct that encodes a fusion protein. For example, a cell may be transduced (e.g., with a virus encoding a fusion protein), or transfected (e.g., with a plasmid encoding a fusion protein) with a nucleic acid that encodes a fusion protein, or the translated fusion protein. Such transduction may be a stable or transient transduction. In some embodiments, cells expressing a fusion protein or containing a fusion protein may be transduced or transfected with one or more gRNA molecules, for example when the fusion protein comprises a Cas9 (e.g., nCas9) domain. In some embodiments, a plasmid expressing a fusion protein may be introduced into cells through electroporation, transient (e.g., lipofection) and stable genome integration (e.g., piggybac) and viral transduction or other methods known to those of skill in the art.

[0098] In certain embodiments, the methods described above result in a cutting (or nicking) one strand of the double-stranded DNA, for example, the strand that includes the thymine (T) of the target A:T nucleobase pair opposite the strand containing the target adenine (A) that is being oxidized. This nicking result serves to direct mismatch repair machinery to the non-edited strand, ensuring that the chemically modified nucleobase is not interpreted as a lesion by the machinery. This nick may be created by the use of an nCas9.

[0099] The specification also provides methods for efficiently editing a target nucleic acid molecule, e.g., a single nucleobase of a genome, with a base editing system described herein (e.g., in the form of an base editor as described herein or a vector or construct encoding same), thereby installing a transversion edit. Still further, the disclosure provides therapeutic methods for treating a genetic disease and/or for altering or changing a genetic trait or condition by contacting a target nucleic acid molecule, e.g., a target nucleic acid molecule in the genome of an organism, with a base editing system (e.g., in the form of an base editor protein or a vector encoding same) and conducting base editing to treat the genetic disease and/or change the genetic trait (e.g., eye color).

[0100] In the present disclosure, a method is provided for editing a nucleobase pair of a double-stranded DNA sequence, the method comprising: (i) contacting a double-stranded DNA sequence with a complex comprising a base editor and a guide nucleic acid, wherein the double-stranded DNA comprises a target A:T nucleobase pair; and (ii) methylating the adenine (A) of the A:T nucleobase pair to N1-methyladenosine.

[0101] In various embodiments, the N1-methyladenosine is subsequently replaced with a thymine (T), thereby generating an A to T change. In other embodiments, the T of the target A:T nucleobase pair is replaced with an adenine.

[0102] In certain embodiments, the methods described above further comprise (iii) cutting (or nicking) one strand of the double-stranded DNA, for example, wherein the one strand comprises the T of the A:T nucleobase pair.

[0103] In other embodiments, the present disclosure provides a complex comprising the base editor fusion proteins described herein and an RNA bound to the napDNAbp of the fusion protein, such as a guide RNA (gRNA), e.g. a single guide RNA.

[0104] The target nucleotide sequence may comprise a target sequence (e.g., a point mutation) associated with a disease, disorder, or condition, such as sickle cell anemia, Fanconi anemia, ectodermal dysplasia skin fragility syndrome, lattice corneal dystrophy Type III, or Noonan syndrome. The target sequence may comprise a T to A point mutation associated with a disease, disorder, or condition, and wherein the methylation of the mutant A base results in mismatch repair-mediated correction to a sequence that is not associated with a disease, or disorder, or condition. The target sequence may instead comprise an A to T point mutation associated with a disease, disorder, or condition, and wherein the methylation of the A base paired with the mutant T results in mismatch repair-mediated correction to a sequence that is not associated with a disease, or disorder, or condition. The target sequence may encode a protein, and where the point mutation is in a codon and results in a change in the amino acid encoded by the mutant codon as compared to a wild-type codon. The target sequence may also be at a splice site, and the point mutation results in a change in the splicing of an mRNA transcript as compared to a wild-type transcript. In addition, the target may be at a non-coding sequence of a gene, such as a promoter, and the point mutation results in increased or decreased expression of the gene.

[0105] Exemplary target genes include HBB, in which an A to T point mutation at residue 334 results in a sickle cell anemia phenotype; and FANCC, in which an A to T point mutation at residue 456 results in a Fanconi anemia phenotype. Additional target genes include TGFBI (associated with lattice corneal dystrophy type III), PKP1 (associated with ectodermal dysplasiaskin fragility syndrome), KRAS and SOS1 (both associated with Noonan syndrome), for which the disease phenotype is frequently caused by T:A to A:T point mutations.

[0106] In various embodiments, application of the base editors results in the methylation of a target site. In some cases, the methylation of a mutant A results in a change of the amino acid encoded by the mutant codon, which in some cases can result in the expression of a wild-type amino acid. The application of the base editors can also result in a change of the mRNA transcript, and even restoring the mRNA transcript to a wild-type state.

[0107] The methods described herein involving contacting a base editor with a target nucleotide sequence can occur in vitro, ex vivo, or in vivo in a subject. In certain embodiments, the subject has been diagnosed with a disease, disorder, or condition, such as, but not limited to, a disease, disorder, or condition associated with a point mutation in the HBB gene, the TGFBI gene, the PKP1 gene, the KRAS gene, the SOS1 gene, or the FANCC gene. The methods described herein involving contacting a base editor with a target nucleotide sequence in the genome of an organism, e.g. a human.

[0108] In another aspect, the specification discloses a pharmaceutical composition comprising any one of the presently disclosed base editor fusion proteins. In one aspect, the specification discloses a pharmaceutical composition comprising any one of the presently disclosed complexes of fusion proteins and gRNA. In one aspect, the specification discloses a pharmaceutical composition comprising polynucleotides encoding the fusion proteins disclosed herein and polynucleotides encoding a gRNA, or polynucleotides encoding both.

[0109] In another aspect, the specification discloses a pharmaceutical composition comprising any one of the presently disclosed vectors. In certain embodiments, the pharmaceutical composition further comprises a pharmaceutically acceptable excipient. In certain embodiments, the pharmaceutical composition further comprises a lipid and/or polymer. In certain embodiments, the lipid and/or polymer is cationic. The preparation of such lipid particles is well known. See, e.g. U.S. Pat. Nos. 4,880,635; 4,906,477; 4,911,928; 4,917,951; 4,920,016; 4,921,757; and 9,737,604, each of which is incorporated herein by reference.

[0110] In various embodiments, the present disclosure provides T-to-A (or A-to-T) transversion base editor fusion proteins comprising (i) a nucleic acid programmable DNA binding protein (napDNAbp), and (ii) a nucleobase modification domain capable of facilitating the conversion of a A:T nucleobase pair to a T:A nucleobase pair in a target nucleotide sequence, e.g., a genome.

[0111] In various embodiments, the nucleobase modification domain may be an adenosine methyltransferase, which enzymatically converts an adenosine nucleoside of an A:T nucleobase pair to N1-methyladenosine, which then is subsequently processed by the cell's DNA repair and replication machinery to a thymine, thereby converting the A:T nucleobase pair to a T:A nucleobase pair.

[0112] The various domains of the transversion fusion proteins described herein (e.g., the Cas9 domain or the nucleobase modification domains) may be obtained as a result of mutagenizing a reference or starting-point base editor (or a component or domain thereof) by an evolution or modification strategy. Such strategies include a directed evolution process, e.g., a continuous evolution method (e.g., PACE) or a non-continuous evolution method (e.g., PANCE or other discrete plate-based selections). In various embodiments, the disclosure provides a base editor that has one or more amino acid variations introduced into its amino acid sequence relative to the amino acid sequence of the reference or starting-point base editor. The base editor may include variants in one or more components or domains of the base editor (e.g., variants introduced into a Cas9 domain, an adenosine methyltransferase domain, an inhibitor of DNA alkylation repair (iDAR) domain, or variants introduced into combinations of these domains). For example, the nucleobase modification domain may be evolved from a reference protein that is an RNA modifying enzyme (e.g., a mRNA or tRNA methyltransferase) and evolved using PACE, PANCE, or other plate-based evolution methods to obtain a DNA modifying version of the nucleobase modification domain, which can then be used in the fusion proteins described herein.

I. napDNAbp Domains

[0113] The base editors described herein comprise a nucleic acid programmable DNA binding (napDNAbp) domain. The napDNAbp is associated with at least one guide nucleic acid (e.g., guide RNA), which localizes the napDNAbp to a DNA sequence that comprises a DNA strand (i.e., a target strand) that is complementary to the guide nucleic acid, or a portion thereof (e.g., the protospacer of a guide RNA). In other words, the guide nucleic-acid “programs” the napDNAbp domain to localize and bind to a complementary sequence of the target strand. Binding of the napDNAbp domain to a complementary sequence enables the nucleobase modification domain of the base editor to access and enzymatically deaminate a target adenine base in the target strand.

[0114] The napDNAbp can be a CRISPR (clustered regularly interspaced short palindromic repeat)-associated nuclease. As outlined above, CRISPR is an adaptive immune system that provides protection against mobile genetic elements (viruses, transposable elements and conjugative plasmids). CRISPR clusters contain spacers, sequences complementary to antecedent mobile elements, and target invading nucleic acids. CRISPR clusters are transcribed and processed into CRISPR RNA (crRNA). In type II CRISPR systems correct processing of pre-crRNA requires a trans-encoded small RNA (tracrRNA), endogenous ribonuclease 3 (rnc) and a Cas9 protein. The tracrRNA serves as a guide for ribonuclease 3-aided processing of pre-crRNA. Subsequently, Cas9/crRNA/tracrRNA endonucleolytically cleaves linear or circular dsDNA target complementary to the spacer. The target strand not complementary to crRNA is first cut endonucleolytically, then trimmed 3′-5′ exonucleolytically. In nature, DNA-binding and cleavage typically requires protein and both RNAs. However, single guide RNAs (“sgRNA”, or simply “gNRA”) can be engineered so as to incorporate aspects of both the crRNA and tracrRNA into a single RNA species. See, e.g., Jinek et al., Science 337:816-821(2012), the entire contents of which is hereby incorporated by reference.

[0115] Without wishing to be bound by any particular theory, the binding mechanism of a napDNAbp—guide RNA complex, in general, includes the step of forming an R-loop whereby the napDNAbp induces the unwinding of a double-strand DNA target, thereby separating the strands in the region bound by the napDNAbp. The guideRNA protospacer then hybridizes to the “target strand.” This displaces a “non-target strand” that is complementary to the target strand, which forms the single strand region of the R-loop. In some embodiments, the napDNAbp includes one or more nuclease activities, which cuts the DNA leaving various types of lesions (e.g., a nick in one strand of the DNA). For example, the napDNAbp may comprises a nuclease activity that cuts the non-target strand at a first location, and/or cuts the target strand at a second location. Depending on the nuclease activity, the target DNA can be cut to form a “double-stranded break” whereby both strands are cut. In other embodiments, the target DNA can be cut at only a single site, i.e., the DNA is “nicked” on one strand.

[0116] The below description of various napDNAbps which can be used in connection with the disclosed nucleobase modification domains is not meant to be limiting in any way. The base editors may comprise the canonical SpCas9, or any ortholog Cas9 protein, or any variant Cas9 protein—including any naturally occurring variant, mutant, or otherwise engineered version of Cas9—that is known or which can be made or evolved through a directed evolution or otherwise mutagenic process. In various embodiments, the napDNAbp has a nickase activity, i.e., only cleave one strand of the target DNA sequence. In other embodiments, the napDNAbp has an inactive nuclease, e.g., are “dead” proteins. Other variant Cas9 proteins that may be used are those having a smaller molecular weight than the canonical SpCas9 (e.g., for easier delivery) or having modified or rearranged primary amino acid sequence (e.g., the circular permutant forms). The base editors described herein may also comprise Cas9 equivalents, including Cas12a/Cpf1 and Cas12b proteins. The napDNAbps used herein (e.g., an SpCas9 or SpCas9 variant) may also may also contain various modifications that alter/enhance their PAM specifities. The disclosure contemplates any Cas9, Cas9 variant, or Cas9 equivalent which has at least 70%, at least 75%, at least 80%, at least 85%, at least 90%, at least 91%, at least 92%, at least 93%, at least 94%, at least 95%, at least 96%, at least 97%, at least 98%, at least 99%, or at least 99.9% sequence identity to a reference Cas9 sequence, such as a reference SpCas9 canonical sequence (set forth in SEQ ID NO: 9), a reference SaCas9 canonical sequence (set forth in SEQ ID NO: 72) or a reference Cas9 equivalent (e.g., Cas12a/Cpf1).

[0117] In some embodiments, the napDNAbp directs cleavage of one or both strands at the location of a target sequence, such as within the target sequence and/or within the complement of the target sequence. In some embodiments, the napDNAbp directs cleavage of one or both strands within about 1, 2, 3, 4, 5, 6, 7, 8, 9, 10, 15, 20, 25, 50, 100, 200, 500, or more base pairs from the first or last nucleotide of a target sequence. For example, an aspartate-to-alanine substitution (D10A) in the RuvC I catalytic domain of Cas9 from S. pyogenes converts Cas9 from a nuclease that cleaves both strands to a nickase (cleaves a single strand). Other examples of mutations that render Cas9 a nickase include, without limitation, H840A, N854A, and N863A in reference to the canonical SpCas9 sequence, or to equivalent amino acid positions in other Cas9 variants or Cas9 equivalents.

[0118] As used herein, the term “Cas protein” refers to a full-length Cas protein obtained from nature, a recombinant Cas protein having a sequences that differs from a naturally occurring Cas protein, or any fragment of a Cas protein that nevertheless retains all or a significant amount of the requisite basic functions needed for the disclosed methods, i.e., (i) possession of nucleic-acid programmable binding of the Cas protein to a target DNA, and (ii) ability to nick the target DNA sequence on one strand. The Cas proteins contemplated herein embrace CRISPR Cas9 proteins, as well as Cas9 equivalents, variants (e.g., Cas9 nickase (nCas9) or nuclease inactive Cas9 (dCas9)) homologs, orthologs, or paralogs, whether naturally occurring or non-naturally occurring (e.g., engineered or recombinant), and may include a Cas9 equivalent from any type of CRISPR system (e.g., type II, V, VI), including Cpf1 (a type-V CRISPR-Cas systems), C2c1 (a type V CRISPR-Cas system), C2c2 (a type VI CRISPR-Cas system) and C2c3 (a type V CRISPR-Cas system). Further Cas-equivalents are described in Makarova et al., “C2c2 is a single-component programmable RNA-guided RNA-targeting CRISPR effector,” Science 2016; 353(6299), the contents of which are incorporated herein by reference.

[0119] The term “Cas9” or “Cas9 domain” embraces any naturally occurring Cas9 from any organism, any naturally-occurring Cas9 equivalent or functional fragment thereof, any Cas9 homolog, ortholog, or paralog from any organism, and any mutant or variant of a Cas9, naturally-occurring or engineered. The term Cas9 is not meant to be particularly limiting and may be referred to as a “Cas9 or equivalent.” Exemplary Cas9 proteins are further described herein and/or are described in the art and are incorporated herein by reference. The present disclosure is unlimited with regard to the particular napDNAbp that is employed in the base editors of the disclosure.

[0120] Additional Cas9 sequences and structures are well known to those of skill in the art (see, e.g., “Complete genome sequence of an M1 strain of Streptococcus pyogenes.” Ferretti et al., J. J., McShan W. M., Ajdic D. J., Savic D. J., Savic G., Lyon K., Primeaux C., Sezate S., Suvorov A. N., Kenton S., Lai H. S., Lin S. P., Qian Y., Jia H. G., Najar F. Z., Ren Q., Zhu H., Song L., White J., Yuan X., Clifton S. W., Roe B. A., McLaughlin R. E., Proc. Natl. Acad. Sci. U.S.A. 98:4658-4663(2001); “CRISPR RNA maturation by trans-encoded small RNA and host factor RNase III.” Deltcheva E., Chylinski K., Sharma C. M., Gonzales K., Chao Y., Pirzada Z. A., Eckert M. R., Vogel J., Charpentier E., Nature 471:602-607(2011); and “A programmable dual-RNA-guided DNA endonuclease in adaptive bacterial immunity.” Jinek M., Chylinski K., Fonfara I., Hauer M., Doudna J. A., Charpentier E. Science 337:816-821(2012), the entire contents of each of which are incorporated herein by reference), and also provided below.

[0121] Examples of Cas9 and Cas9 equivalents are provided as follows; however, these specific examples are not meant to be limiting. The base editors of the present disclosure may use any suitable napDNAbp, including any suitable Cas9 or Cas9 equivalent.

[0122] Wild Type Canonical SpCas9

[0123] In one embodiment, the base editor constructs described herein may comprise the “canonical SpCas9” nuclease from S. pyogenes, which has been widely used as a tool for genome engineering. This Cas9 protein is a large, multi-domain protein containing two distinct nuclease domains. Point mutations can be introduced into Cas9 to abolish one or both nuclease activities, resulting in a nickase Cas9 (nCas9) or dead Cas9 (dCas9), respectively, that still retains its ability to bind DNA in a sgRNA-programmed manner. In principle, when fused to another protein or domain, Cas9 or variant thereof (e.g., nCas9) can target that protein to virtually any DNA sequence simply by co-expression with an appropriate sgRNA. As used herein, the canonical SpCas9 protein refers to the wild type protein from Streptococcus pyogenes having the following amino acid sequence:

| Description | Sequence | SEQ ID NO: |
|---|---|---|
| SpCas9 | MDKKYSIGLDIGTNSVGWAVITDEYKVPSKKFKVLGNTDRHSIKKNLIGALLFDS | SEQ ID NO: 9 |
| Streptococcus | GETAEATRLKRTARRRYTRRKNRICYLQEIFSNEMAKVDDSFFHRLEESFLVEED | |
| pyogenes | KKHERHPIFGNIVDEVAYHEKYPTIYHLRKKLVDSTDKADLRLIYLALAHMIKFR | |
| M1 | GHFLIEGDLNPDNSDVDKLFIQLVQTYNQLFEENPINASGVDAKAILSARLSKSR | |
| SwissProt | RLENLIAQLPGEKKNGLFGNLIALSLGLTPNFKSNFDLAEDAKLQLSKDTYDDDL | |
| Accession | DNLLAQIGDQYADLFLAAKNLSDAILLSDILRVNTEITKAPLSASMIKRYDEHHQ | |
| No. Q99ZW2 | DLTLLKALVRQQLPEKYKEIFFDQSKNGYAGYIDGGASQEEFYKFIKPILEKMDG | |
| Wild type | TEELLVKLNREDLLRKQRTFDNGSIPHQIHLGELHAILRRQEDFYPFLKDNREKI | |
| | EKILTFRIPYYVGPLARGNSRFAWMTRKSEETITPWNFEEVVDKGASAQSFIERM | |
| | TNFDKNLPNEKVLPKHSLLYEYFTVYNELTKVKYVTEGMRKPAFLSGEQKKAIVD | |
| | LLFKTNRKVTVKQLKEDYFKKIECFDSVEISGVEDRFNASLGTYHDLLKIIKDKD | |
| | FLDNEENEDILEDIVLTLTLFEDREMIEERLKTYAHLFDDKVMKQLKRRRYTGWG | |
| | RLSRKLINGIRDKQSGKTILDFLKSDGFANRNFMQLIHDDSLTFKEDIQKAQVSG | |
| | QGDSLHEHIANLAGSPAIKKGILQTVKVVDELVKVMGRHKPENIVIEMARENQTT | |
| | QKGQKNSRERMKRIEEGIKELGSQILKEHPVENTQLQNEKLYLYYLQNGRDMYVD | |
| | QELDINRLSDYDVDHIVPQSFLKDDSIDNKVLTRSDKNRGKSDNVPSEEVVKKMK | |
| | NYWRQLLNAKLITQRKFDNLTKAERGGLSELDKAGFIKRQLVETRQITKHVAQIL | |
| | DSRMNTKYDENDKLIREVKVITLKSKLVSDFRKDFQFYKVREINNYHHAHDAYLN | |
| | AVVGTALIKKYPKLESEFVYGDYKVYDVRKMIAKSEQEIGKATAKYFFYSNIMNF | |
| | FKTEITLANGEIRKRPLIETNGETGEIVWDKGRDFATVRKVLSMPQVNIVKKTEV | |
| | QTGGFSKESILPKRNSDKLIARKKDWDPKKYGGFDSPTVAYSVLVVAKVEKGKSK | |
| | KLKSVKELLGITIMERSSFEKNPIDFLEAKGYKEVKKDLIIKLPKYSLFELENGR | |
| | KRMLASAGELQKGNELALPSKYVNFLYLASHYEKLKGSPEDNEQKQLFVEQHKHY | |
| | LDEIIEQISEFSKRVILADANLDKVLSAYNKHRDKPIREQAENIIHLFTLTNLGA | |
| | PAAFKYFDTTIDRKRYTSTKEVLDATLIHQSITGLYETRIDLSQLGGD | |
| SpCas9 | ATGGATAAAAAATATAGCATTGGCCTGGATATTGGCACCAACAGCGTGGGCTGGG | SEQ ID NO: 64 |
| Reverse | CGGTGATTACCGATGAATATAAAGTGCCGAGCAAAAAATTTAAAGTGCTGGGCAA | |
| translation | CACCGATCGCCATAGCATTAAAAAAAACCTGATTGGCGCGCTGCTGTTTGATAGC | |
| of | GGCGAAACCGCGGAAGCGACCCGCCTGAAACGCACCGCGCGCCGCCGCTATACCC | |
| SwissProt | GCCGCAAAAACCGCATTTGCTATCTGCAGGAAATTTTTAGCAACGAAATGGCGAA | |
| Accession | AGTGGATGATAGCTTTTTTCATCGCCTGGAAGAAAGCTTTCTGGTGGAAGAAGAT | |
| No. Q99ZW2 | AAAAAACATGAACGCCATCCGATTTTTGGCAACATTGTGGATGAAGTGGCGTATC | |
| Streptococcus | ATGAAAAATATCCGACCATTTATCATCTGCGCAAAAAACTGGTGGATAGCACCGA | |
| pyogenes | TAAAGCGGATCTGCGCCTGATTTATCTGGCGCTGGCGCATATGATTAAATTTCGC | |
| | GGCCATTTTCTGATTGAAGGCGATCTGAACCCGGATAACAGCGATGTGGATAAAC | |
| | TGTTTATTCAGCTGGTGCAGACCTATAACCAGCTGTTTGAAGAAAACCCGATTAA | |
| | CGCGAGCGGCGTGGATGCGAAAGCGATTCTGAGCGCGCGCCTGAGCAAAAGCCGC | |
| | CGCCTGGAAAACCTGATTGCGCAGCTGCCGGGCGAAAAAAAAAACGGCCTGTTTG | |
| | GCAACCTGATTGCGCTGAGCCTGGGCCTGACCCCGAACTTTAAAAGCAACTTTGA | |
| | TCTGGCGGAAGATGCGAAACTGCAGCTGAGCAAAGATACCTATGATGATGATCTG | |
| | GATAACCTGCTGGCGCAGATTGGCGATCAGTATGCGGATCTGTTTCTGGCGGCGA | |
| | AAAACCTGAGCGATGCGATTCTGCTGAGCGATATTCTGCGCGTGAACACCGAAAT | |
| | TACCAAAGCGCCGCTGAGCGCGAGCATGATTAAACGCTATGATGAACATCATCAG | |
| | GATCTGACCCTGCTGAAAGCGCTGGTGCGCCAGCAGCTGCCGGAAAAATATAAAG | |
| | AAATTTTTTTTGATCAGAGCAAAAACGGCTATGCGGGCTATATTGATGGCGGCGC | |
| | GAGCCAGGAAGAATTTTATAAATTTATTAAACCGATTCTGGAAAAAATGGATGGC | |
| | ACCGAAGAACTGCTGGTGAAACTGAACCGCGAAGATCTGCTGCGCAAACAGCGCA | |
| | CCTTTGATAACGGCAGCATTCCGCATCAGATTCATCTGGGCGAACTGCATGCGAT | |
| | TCTGCGCCGCCAGGAAGATTTTTATCCGTTTCTGAAAGATAACCGCGAAAAAATT | |
| | GAAAAAATTCTGACCTTTCGCATTCCGTATTATGTGGGCCCGCTGGCGCGCGGCA | |
| | ACAGCCGCTTTGCGTGGATGACCCGCAAAAGCGAAGAAACCATTACCCCGTGGAA | |
| | CTTTGAAGAAGTGGTGGATAAAGGCGCGAGCGCGCAGAGCTTTATTGAACGCATG | |
| | ACCAACTTTGATAAAAACCTGCCGAACGAAAAAGTGCTGCCGAAACATAGCCTGC | |
| | TGTATGAATATTTTACCGTGTATAACGAACTGACCAAAGTGAAATATGTGACCGA | |
| | AGGCATGCGCAAACCGGCGTTTCTGAGCGGCGAACAGAAAAAAGCGATTGTGGAT | |
| | CTGCTGTTTAAAACCAACCGCAAAGTGACCGTGAAACAGCTGAAAGAAGATTATT | |
| | TTAAAAAAATTGAATGCTTTGATAGCGTGGAAATTAGCGGCGTGGAAGATCGCTT | |
| | TAACGCGAGCCTGGGCACCTATCATGATCTGCTGAAAATTATTAAAGATAAAGAT | |
| | TTTCTGGATAACGAAGAAAACGAAGATATTCTGGAAGATATTGTGCTGACCCTGA | |
| | CCCTGTTTGAAGATCGCGAAATGATTGAAGAACGCCTGAAAACCTATGCGCATCT | |
| | GTTTGATGATAAAGTGATGAAACAGCTGAAACGCCGCCGCTATACCGGCTGGGGC | |
| | CGCCTGAGCCGCAAACTGATTAACGGCATTCGCGATAAACAGAGCGGCAAAACCA | |
| | TTCTGGATTTTCTGAAAAGCGATGGCTTTGCGAACCGCAACTTTATGCAGCTGAT | |
| | TCATGATGATAGCCTGACCTTTAAAGAAGATATTCAGAAAGCGCAGGTGAGCGGC | |
| | CAGGGCGATAGCCTGCATGAACATATTGCGAACCTGGCGGGCAGCCCGGCGATTA | |
| | AAAAAGGCATTCTGCAGACCGTGAAAGTGGTGGATGAACTGGTGAAAGTGATGGG | |
| | CCGCCATAAACCGGAAAACATTGTGATTGAAATGGCGCGCGAAAACCAGACCACC | |
| | CAGAAAGGCCAGAAAAACAGCCGCGAACGCATGAAACGCATTGAAGAAGGCATTA | |
| | AAGAACTGGGCAGCCAGATTCTGAAAGAACATCCGGTGGAAAACACCCAGCTGCA | |
| | GAACGAAAAACTGTATCTGTATTATCTGCAGAACGGCCGCGATATGTATGTGGAT | |
| | CAGGAACTGGATATTAACCGCCTGAGCGATTATGATGTGGATCATATTGTGCCGC | |
| | AGAGCTTTCTGAAAGATGATAGCATTGATAACAAAGTGCTGACCCGCAGCGATAA | |
| | AAACCGCGGCAAAAGCGATAACGTGCCGAGCGAAGAAGTGGTGAAAAAAATGAAA | |
| | AACTATTGGCGCCAGCTGCTGAACGCGAAACTGATTACCCAGCGCAAATTTGATA | |
| | ACCTGACCAAAGCGGAACGCGGCGGCCTGAGCGAACTGGATAAAGCGGGCTTTAT | |
| | TAAACGCCAGCTGGTGGAAACCCGCCAGATTACCAAACATGTGGCGCAGATTCTG | |
| | GATAGCCGCATGAACACCAAATATGATGAAAACGATAAACTGATTCGCGAAGTGA | |
| | AAGTGATTACCCTGAAAAGCAAACTGGTGAGCGATTTTCGCAAAGATTTTCAGTT | |
| | TTATAAAGTGCGCGAAATTAACAACTATCATCATGCGCATGATGCGTATCTGAAC | |
| | GCGGTGGTGGGCACCGCGCTGATTAAAAAATATCCGAAACTGGAAAGCGAATTTG | |
| | TGTATGGCGATTATAAAGTGTATGATGTGCGCAAAATGATTGCGAAAAGCGAACA | |
| | GGAAATTGGCAAAGCGACCGCGAAATATTTTTTTTATAGCAACATTATGAACTTT | |
| | TTTAAAACCGAAATTACCCTGGCGAACGGCGAAATTCGCAAACGCCCGCTGATTG | |
| | AAACCAACGGCGAAACCGGCGAAATTGTGTGGGATAAAGGCCGCGATTTTGCGAC | |
| | CGTGCGCAAAGTGCTGAGCATGCCGCAGGTGAACATTGTGAAAAAAACCGAAGTG | |
| | CAGACCGGCGGCTTTAGCAAAGAAAGCATTCTGCCGAAACGCAACAGCGATAAAC | |
| | TGATTGCGCGCAAAAAAGATTGGGATCCGAAAAAATATGGCGGCTTTGATAGCCC | |
| | GACCGTGGCGTATAGCGTGCTGGTGGTGGCGAAAGTGGAAAAAGGCAAAAGCAAA | |
| | AAACTGAAAAGCGTGAAAGAACTGCTGGGCATTACCATTATGGAACGCAGCAGCT | |
| | TTGAAAAAAACCCGATTGATTTTCTGGAAGCGAAAGGCTATAAAGAAGTGAAAAA | |
| | AGATCTGATTATTAAACTGCCGAAATATAGCCTGTTTGAACTGGAAAACGGCCGC | |
| | AAACGCATGCTGGCGAGCGCGGGCGAACTGCAGAAAGGCAACGAACTGGCGCTGC | |
| | CGAGCAAATATGTGAACTTTCTGTATCTGGCGAGCCATTATGAAAAACTGAAAGG | |
| | CAGCCCGGAAGATAACGAACAGAAACAGCTGTTTGTGGAACAGCATAAACATTAT | |
| | CTGGATGAAATTATTGAACAGATTAGCGAATTTAGCAAACGCGTGATTCTGGCGG | |
| | ATGCGAACCTGGATAAAGTGCTGAGCGCGTATAACAAACATCGCGATAAACCGAT | |
| | TCGCGAACAGGCGGAAAACATTATTCATCTGTTTACCCTGACCAACCTGGGCGCG | |
| | CCGGCGGCGTTTAAATATTTTGATACCACCATTGATCGCAAACGCTATACCAGCA | |
| | CCAAAGAAGTGCTGGATGCGACCCTGATTCATCAGAGCATTACCGGCCTGTATGA | |
| | AACCCGCATTGATCTGAGCCAGCTGGGCGGCGAT | |

[0124] The base editors described herein may include canonical SpCas9, or any variant thereof having at least 80%, at least 85%, at least 90%, at least 95%, or at least 99% sequence identity with a wild type Cas9 sequence provided above. These variants may include SpCas9 variants containing one or more mutations, including any known mutation reported with the SwissProt Accession No. Q99ZW2 entry, which include:

| SpCas9 mutation (relative to the | Function/Characteristic (as reported) |
|---|---|
| amino acid sequence | (see UniProtKB - Q99ZW2 |
| of the canonical SpCas9 | (CAS9_STRPT1) entry - |
| sequence, SEQ ID NO: 9) | incorporated herein by reference) |
| D10A | Nickase mutant |
| | which cleaves the protospacer |
| | strand (but no cleavage of |
| | non-protospacer strand) |
| S15A | Decreased DNA cleavage activity |
| R66A | Decreased DNA cleavage activity |
| R70A | No DNA cleavage |
| R74A | Decreased DNA cleavage |
| R78A | Decreased DNA cleavage |
| 97-150 deletion | No nuclease activity |
| R165A | Decreased DNA cleavage |
| 175-307 deletion | About 50% decreased DNA cleavage |
| 312-409 deletion | No nuclease activity |
| E762A | Nickase |
| H840A | Nickase mutant which |
| | cleaves the non- |
| | protospacer strand but does not |
| | cleave the protospacer strand |
| N854A | Nickase |
| N863A | Nickase |
| H982A | Decreased DNA cleavage |
| D986A | Nickase |
| 1099-1368 deletion | No nuclease activity |
| R1333A | Reduced DNA binding |

[0125] Other wild type SpCas9 sequences that may be used in the present disclosure, include:

| Description | Sequence | SEQ ID NO: |
|---|---|---|
| SpCas9 | ATGGATAAGAAATACTCAATAGGCTTAGATATCGGCACAAATAGCGTCGGATGGGCG | SEQ ID NO: 65 |
| Streptococcus | GTGATCACTGATGATTATAAGGTTCCGTCTAAAAAGTTCAAGGTTCTGGGAAATACA | |
| pyogenes | GACCGCCACAGTATCAAAAAAAATCTTATAGGGGCTCTTTTATTTGGCAGTGGAGAG | |
| MGAS1882 | ACAGCGGAAGCGACTCGTCTCAAACGGACAGCTCGTAGAAGGTATACACGTCGGAAG | |
| wild type | AATCGTATTTGTTATCTACAGGAGATTTTTTCAAATGAGATGGCGAAAGTAGATGAT | |
| NC_017053.1 | AGTTTCTTTCATCGACTTGAAGAGTCTTTTTTGGTGGAAGAAGACAAGAAGCATGAA | |
| | CGTCATCCTATTTTTGGAAATATAGTAGATGAAGTTGCTTATCATGAGAAATATCCA | |
| | ACTATCTATCATCTGCGAAAAAAATTGGCAGATTCTACTGATAAAGCGGATTTGCGC | |
| | TTAATCTATTTGGCCTTAGCGCATATGATTAAGTTTCGTGGTCATTTTTTGATTGAG | |
| | GGAGATTTAAATCCTGATAATAGTGATGTGGACAAACTATTTATCCAGTTGGTACAA | |
| | ATCTACAATCAATTATTTGAAGAAAACCCTATTAACGCAAGTAGAGTAGATGCTAAA | |
| | GCGATTCTTTCTGCACGATTGAGTAAATCAAGACGATTAGAAAATCTCATTGCTCAG | |
| | CTCCCCGGTGAGAAGAGAAATGGCTTGTTTGGGAATCTCATTGCTTTGTCATTGGGA | |
| | TTGACCCCTAATTTTAAATCAAATTTTGATTTGGCAGAAGATGCTAAATTACAGCTT | |
| | TCAAAAGATACTTACGATGATGATTTAGATAATTTATTGGCGCAAATTGGAGATCAA | |
| | TATGCTGATTTGTTTTTGGCAGCTAAGAATTTATCAGATGCTATTTTACTTTCAGAT | |
| | ATCCTAAGAGTAAATAGTGAAATAACTAAGGCTCCCCTATCAGCTTCAATGATTAAG | |
| | CGCTACGATGAACATCATCAAGACTTGACTCTTTTAAAAGCTTTAGTTCGACAACAA | |
| | CTTCCAGAAAAGTATAAAGAAATCTTTTTTGATCAATCAAAAAACGGATATGCAGGT | |
| | TATATTGATGGGGGAGCTAGCCAAGAAGAATTTTATAAATTTATCAAACCAATTTTA | |
| | GAAAAAATGGATGGTACTGAGGAATTATTGGTGAAACTAAATCGTGAAGATTTGCTG | |
| | CGCAAGCAACGGACCTTTGACAACGGCTCTATTCCCCATCAAATTCACTTGGGTGAG | |
| | CTGCATGCTATTTTGAGAAGACAAGAAGACTTTTATCCATTTTTAAAAGACAATCGT | |
| | GAGAAGATTGAAAAAATCTTGACTTTTCGAATTCCTTATTATGTTGGTCCATTGGCG | |
| | CGTGGCAATAGTCGTTTTGCATGGATGACTCGGAAGTCTGAAGAAACAATTACCCCA | |
| | TGGAATTTTGAAGAAGTTGTCGATAAAGGTGCTTCAGCTCAATCATTTATTGAACGC | |
| | ATGACAAACTTTGATAAAAATCTTCCAAATGAAAAAGTACTACCAAAACATAGTTTG | |
| | CTTTATGAGTATTTTACGGTTTATAACGAATTGACAAAGGTCAAATATGTTACTGAG | |
| | GGAATGCGAAAACCAGCATTTCTTTCAGGTGAACAGAAGAAAGCCATTGTTGATTTA | |
| | CTCTTCAAAACAAATCGAAAAGTAACCGTTAAGCAATTAAAAGAAGATTATTTCAAA | |
| | AAAATAGAATGTTTTGATAGTGTTGAAATTTCAGGAGTTGAAGATAGATTTAATGCT | |
| | TCATTAGGCGCCTACCATGATTTGCTAAAAATTATTAAAGATAAAGATTTTTTGGAT | |
| | AATGAAGAAAATGAAGATATCTTAGAGGATATTGTTTTAACATTGACCTTATTTGAA | |
| | GATAGGGGGATGATTGAGGAAAGACTTAAAACATATGCTCACCTCTTTGATGATAAG | |
| | GTGATGAAACAGCTTAAACGTCGCCGTTATACTGGTTGGGGACGTTTGTCTCGAAAA | |
| | TTGATTAATGGTATTAGGGATAAGCAATCTGGCAAAACAATATTAGATTTTTTGAAA | |
| | TCAGATGGTTTTGCCAATCGCAATTTTATGCAGCTGATCCATGATGATAGTTTGACA | |
| | TTTAAAGAAGATATTCAAAAAGCACAGGTGTCTGGACAAGGCCATAGTTTACATGAA | |
| | CAGATTGCTAACTTAGCTGGCAGTCCTGCTATTAAAAAAGGTATTTTACAGACTGTA | |
| | AAAATTGTTGATGAACTGGTCAAAGTAATGGGGCATAAGCCAGAAAATATCGTTATT | |
| | GAAATGGCACGTGAAAATCAGACAACTCAAAAGGGCCAGAAAAATTCGCGAGAGCGT | |
| | ATGAAACGAATCGAAGAAGGTATCAAAGAATTAGGAAGTCAGATTCTTAAAGAGCAT | |
| | CCTGTTGAAAATACTCAATTGCAAAATGAAAAGCTCTATCTCTATTATCTACAAAAT | |
| | GGAAGAGACATGTATGTGGACCAAGAATTAGATATTAATCGTTTAAGTGATTATGAT | |
| | GTCGATCACATTGTTCCACAAAGTTTCATTAAAGACGATTCAATAGACAATAAGGTA | |
| | CTAACGCGTTCTGATAAAAATCGTGGTAAATCGGATAACGTTCCAAGTGAAGAAGTA | |
| | GTCAAAAAGATGAAAAACTATTGGAGACAACTTCTAAACGCCAAGTTAATCACTCAA | |
| | CGTAAGTTTGATAATTTAACGAAAGCTGAACGTGGAGGTTTGAGTGAACTTGATAAA | |
| | GCTGGTTTTATCAAACGCCAATTGGTTGAAACTCGCCAAATCACTAAGCATGTGGCA | |
| | CAAATTTTGGATAGTCGCATGAATACTAAATACGATGAAAATGATAAACTTATTCGA | |
| | GAGGTTAAAGTGATTACCTTAAAATCTAAATTAGTTTCTGACTTCCGAAAAGATTTC | |
| | CAATTCTATAAAGTACGTGAGATTAACAATTACCATCATGCCCATGATGCGTATCTA | |
| | AATGCCGTCGTTGGAACTGCTTTGATTAAGAAATATCCAAAACTTGAATCGGAGTTT | |
| | GTCTATGGTGATTATAAAGTTTATGATGTTCGTAAAATGATTGCTAAGTCTGAGCAA | |
| | GAAATAGGCAAAGCAACCGCAAAATATTTCTTTTACTCTAATATCATGAACTTCTTC | |
| | AAAACAGAAATTACACTTGCAAATGGAGAGATTCGCAAACGCCCTCTAATCGAAACT | |
| | AATGGGGAAACTGGAGAAATTGTCTGGGATAAAGGGCGAGATTTTGCCACAGTGCGC | |
| | AAAGTATTGTCCATGCCCCAAGTCAATATTGTCAAGAAAACAGAAGTACAGACAGGC | |
| | GGATTCTCCAAGGAGTCAATTTTACCAAAAAGAAATTCGGACAAGCTTATTGCTCGT | |
| | AAAAAAGACTGGGATCCAAAAAAATATGGTGGTTTTGATAGTCCAACGGTAGCTTAT | |
| | TCAGTCCTAGTGGTTGCTAAGGTGGAAAAAGGGAAATCGAAGAAGTTAAAATCCGTT | |
| | AAAGAGTTACTAGGGATCACAATTATGGAAAGAAGTTCCTTTGAAAAAAATCCGATT | |
| | GACTTTTTAGAAGCTAAAGGATATAAGGAAGTTAAAAAAGACTTAATCATTAAACTA | |
| | CCTAAATATAGTCTTTTTGAGTTAGAAAACGGTCGTAAACGGATGCTGGCTAGTGCC | |
| | GGAGAATTACAAAAAGGAAATGAGCTGGCTCTGCCAAGCAAATATGTGAATTTTTTA | |
| | TATTTAGCTAGTCATTATGAAAAGTTGAAGGGTAGTCCAGAAGATAACGAACAAAAA | |
| | CAATTGTTTGTGGAGCAGCATAAGCATTATTTAGATGAGATTATTGAGCAAATCAGT | |
| | GAATTTTCTAAGCGTGTTATTTTAGCAGATGCCAATTTAGATAAAGTTCTTAGTGCA | |
| | TATAACAAACATAGAGACAAACCAATACGTGAACAAGCAGAAAATATTATTCATTTA | |
| | TTTACGTTGACGAATCTTGGAGCTCCCGCTGCTTTTAAATATTTTGATACAACAATT | |
| | GATCGTAAACGATATACGTCTACAAAAGAAGTTTTAGATGCCACTCTTATCCATCAA | |
| | TCCATCACTGGTCTTTATGAAACACGCATTGATTTGAGTCAGCTAGGAGGTGACTGA | |
| SpCas9 | MDKKYSIGLDIGTNSVGWAVITDDYKVPSKKFKVLGNTDRHSIKKNLIGALLFGSGE | SEQ ID NO: 66 |
| Streptococcus | TAEATRLKRTARRRYTRRKNRICYLQEIFSNEMAKVDDSFFHRLEESFLVEEDKKHE | |
| pyogenes | RHPIFGNIVDEVAYHEKYPTIYHLRKKLADSTDKADLRLIYLALAHMIKFRGHFLIE | |
| MGAS1882 | GDLNPDNSDVDKLFIQLVQIYNQLFEENPINASRVDAKAILSARLSKSRRLENLIAQ | |
| wild type | LPGEKRNGLFGNLIALSLGLTPNFKSNFDLAEDAKLQLSKDTYDDDLDNLLAQIGDQ | |
| NC_017053.1 | YADLFLAAKNLSDAILLSDILRVNSEITKAPLSASMIKRYDEHHQDLTLLKALVRQQ | |
| | LPEKYKEIFFDQSKNGYAGYIDGGASQEEFYKFIKPILEKMDGTEELLVKLNREDLL | |
| | RKQRTFDNGSIPHQIHLGELHAILRRQEDFYPFLKDNREKIEKILTFRIPYYVGPLA | |
| | RGNSRFAWMTRKSEETITPWNFEEVVDKGASAQSFIERMTNFDKNLPNEKVLPKHSL | |
| | LYEYFTVYNELTKVKYVTEGMRKPAFLSGEQKKAIVDLLFKTNRKVTVKQLKEDYFK | |
| | KIECFDSVEISGVEDRFNASLGAYHDLLKIIKDKDFLDNEENEDILEDIVLTLTLFE | |
| | DRGMIEERLKTYAHLFDDKVMKQLKRRRYTGWGRLSRKLINGIRDKQSGKTILDFLK | |
| | SDGFANRNFMQLIHDDSLTFKEDIQKAQVSGQGHSLHEQIANLAGSPAIKKGILQTV | |
| | KIVDELVKVMGHKPENIVIEMARENQTTQKGQKNSRERMKRIEEGIKELGSQILKEH | |
| | PVENTQLQNEKLYLYYLQNGRDMYVDQELDINRLSDYDVDHIVPQSFIKDDSIDNKV | |
| | LTRSDKNRGKSDNVPSEEVVKKMKNYWRQLLNAKLITQRKFDNLTKAERGGLSELDK | |
| | AGFIKRQLVETRQITKHVAQILDSRMNTKYDENDKLIREVKVITLKSKLVSDFRKDF | |
| | QFYKVREINNYHHAHDAYLNAVVGTALIKKYPKLESEFVYGDYKVYDVRKMIAKSEQ | |
| | EIGKATAKYFFYSNIMNFFKTEITLANGEIRKRPLIETNGETGEIVWDKGRDFATVR | |
| | KVLSMPQVNIVKKTEVQTGGFSKESILPKRNSDKLIARKKDWDPKKYGGFDSPTVAY | |
| | SVLVVAKVEKGKSKKLKSVKELLGITIMERSSFEKNPIDFLEAKGYKEVKKDLIIKL | |
| | PKYSLFELENGRKRMLASAGELQKGNELALPSKYVNFLYLASHYEKLKGSPEDNEQK | |
| | QLFVEQHKHYLDEIIEQISEFSKRVILADANLDKVLSAYNKHRDKPIREQAENIIHL | |
| | FTLTNLGAPAAFKYFDTTIDRKRYTSTKEVLDATLIHQSITGLYETRIDLSQLGGD | |
| SpCas9 | ATGGATAAAAAGTATTCTATTGGTTTAGACATCGGCACTAATTCCGTTGGATGGGCT | SEQ ID NO: 67 |
| Streptococcus | GTCATAACCGATGAATACAAAGTACCTTCAAAGAAATTTAAGGTGTTGGGGAACACA | |
| pyogenes | GACCGTCATTCGATTAAAAAGAATCTTATCGGTGCCCTCCTATTCGATAGTGGCGAA | |
| wild type | ACGGCAGAGGCGACTCGCCTGAAACGAACCGCTCGGAGAAGGTATACACGTCGCAAG | |
| SWBC2D7W014 | AACCGAATATGTTACTTACAAGAAATTTTTAGCAATGAGATGGCCAAAGTTGACGAT | |
| | TCTTTCTTTCACCGTTTGGAAGAGTCCTTCCTTGTCGAAGAGGACAAGAAACATGAA | |
| | CGGCACCCCATCTTTGGAAACATAGTAGATGAGGTGGCATATCATGAAAAGTACCCA | |
| | ACGATTTATCACCTCAGAAAAAAGCTAGTTGACTCAACTGATAAAGCGGACCTGAGG | |
| | TTAATCTACTTGGCTCTTGCCCATATGATAAAGTTCCGTGGGCACTTTCTCATTGAG | |
| | GGTGATCTAAATCCGGACAACTCGGATGTCGACAAACTGTTCATCCAGTTAGTACAA | |
| | ACCTATAATCAGTTGTTTGAAGAGAACCCTATAAATGCAAGTGGCGTGGATGCGAAG | |
| | GCTATTCTTAGCGCCCGCCTCTCTAAATCCCGACGGCTAGAAAACCTGATCGCACAA | |
| | TTACCCGGAGAGAAGAAAAATGGGTTGTTCGGTAACCTTATAGCGCTCTCACTAGGC | |
| | CTGACACCAAATTTTAAGTCGAACTTCGACTTAGCTGAAGATGCCAAATTGCAGCTT | |
| | AGTAAGGACACGTACGATGACGATCTCGACAATCTACTGGCACAAATTGGAGATCAG | |
| | TATGCGGACTTATTTTTGGCTGCCAAAAACCTTAGCGATGCAATCCTCCTATCTGAC | |
| | ATACTGAGAGTTAATACTGAGATTACCAAGGCGCCGTTATCCGCTTCAATGATCAAA | |
| | AGGTACGATGAACATCACCAAGACTTGACACTTCTCAAGGCCCTAGTCCGTCAGCAA | |
| | CTGCCTGAGAAATATAAGGAAATATTCTTTGATCAGTCGAAAAACGGGTACGCAGGT | |
| | TATATTGACGGCGGAGCGAGTCAAGAGGAATTCTACAAGTTTATCAAACCCATATTA | |
| | GAGAAGATGGATGGGACGGAAGAGTTGCTTGTAAAACTCAATCGCGAAGATCTACTG | |
| | CGAAAGCAGCGGACTTTCGACAACGGTAGCATTCCACATCAAATCCACTTAGGCGAA | |
| | TTGCATGCTATACTTAGAAGGCAGGAGGATTTTTATCCGTTCCTCAAAGACAATCGT | |
| | GAAAAGATTGAGAAAATCCTAACCTTTCGCATACCTTACTATGTGGGACCCCTGGCC | |
| | CGAGGGAACTCTCGGTTCGCATGGATGACAAGAAAGTCCGAAGAAACGATTACTCCA | |
| | TGGAATTTTGAGGAAGTTGTCGATAAAGGTGCGTCAGCTCAATCGTTCATCGAGAGG | |
| | ATGACCAACTTTGACAAGAATTTACCGAACGAAAAAGTATTGCCTAAGCACAGTTTA | |
| | CTTTACGAGTATTTCACAGTGTACAATGAACTCACGAAAGTTAAGTATGTCACTGAG | |
| | GGCATGCGTAAACCCGCCTTTCTAAGCGGAGAACAGAAGAAAGCAATAGTAGATCTG | |
| | TTATTCAAGACCAACCGCAAAGTGACAGTTAAGCAATTGAAAGAGGACTACTTTAAG | |
| | AAAATTGAATGCTTCGATTCTGTCGAGATCTCCGGGGTAGAAGATCGATTTAATGCG | |
| | TCACTTGGTACGTATCATGACCTCCTAAAGATAATTAAAGATAAGGACTTCCTGGAT | |
| | AACGAAGAGAATGAAGATATCTTAGAAGATATAGTGTTGACTCTTACCCTCTTTGAA | |
| | GATCGGGAAATGATTGAGGAAAGACTAAAAACATACGCTCACCTGTTCGACGATAAG | |
| | GTTATGAAACAGTTAAAGAGGCGTCGCTATACGGGCTGGGGACGATTGTCGCGGAAA | |
| | CTTATCAACGGGATAAGAGACAAGCAAAGTGGTAAAACTATTCTCGATTTTCTAAAG | |
| | AGCGACGGCTTCGCCAATAGGAACTTTATGCAGCTGATCCATGATGACTCTTTAACC | |
| | TTCAAAGAGGATATACAAAAGGCACAGGTTTCCGGACAAGGGGACTCATTGCACGAA | |
| | CATATTGCGAATCTTGCTGGTTCGCCAGCCATCAAAAAGGGCATACTCCAGACAGTC | |
| | AAAGTAGTGGATGAGCTAGTTAAGGTCATGGGACGTCACAAACCGGAAAACATTGTA | |
| | ATCGAGATGGCACGCGAAAATCAAACGACTCAGAAGGGGCAAAAAAACAGTCGAGAG | |
| | CGGATGAAGAGAATAGAAGAGGGTATTAAAGAACTGGGCAGCCAGATCTTAAAGGAG | |
| | CATCCTGTGGAAAATACCCAATTGCAGAACGAGAAACTTTACCTCTATTACCTACAA | |
| | AATGGAAGGGACATGTATGTTGATCAGGAACTGGACATAAACCGTTTATCTGATTAC | |
| | GACGTCGATCACATTGTACCCCAATCCTTTTTGAAGGACGATTCAATCGACAATAAA | |
| | GTGCTTACACGCTCGGATAAGAACCGAGGGAAAAGTGACAATGTTCCAAGCGAGGAA | |
| | GTCGTAAAGAAAATGAAGAACTATTGGCGGCAGCTCCTAAATGCGAAACTGATAACG | |
| | CAAAGAAAGTTCGATAACTTAACTAAAGCTGAGAGGGGTGGCTTGTCTGAACTTGAC | |
| | AAGGCCGGATTTATTAAACGTCAGCTCGTGGAAACCCGCCAAATCACAAAGCATGTT | |
| | GCACAGATACTAGATTCCCGAATGAATACGAAATACGACGAGAACGATAAGCTGATT | |
| | CGGGAAGTCAAAGTAATCACTTTAAAGTCAAAATTGGTGTCGGACTTCAGAAAGGAT | |
| | TTTCAATTCTATAAAGTTAGGGAGATAAATAACTACCACCATGCGCACGACGCTTAT | |
| | CTTAATGCCGTCGTAGGGACCGCACTCATTAAGAAATACCCGAAGCTAGAAAGTGAG | |
| | TTTGTGTATGGTGATTACAAAGTTTATGACGTCCGTAAGATGATCGCGAAAAGCGAA | |
| | CAGGAGATAGGCAAGGCTACAGCCAAATACTTCTTTTATTCTAACATTATGAATTTC | |
| | TTTAAGACGGAAATCACTCTGGCAAACGGAGAGATACGCAAACGACCTTTAATTGAA | |
| | ACCAATGGGGAGACAGGTGAAATCGTATGGGATAAGGGCCGGGACTTCGCGACGGTG | |
| | AGAAAAGTTTTGTCCATGCCCCAAGTCAACATAGTAAAGAAAACTGAGGTGCAGACC | |
| | GGAGGGTTTTCAAAGGAATCGATTCTTCCAAAAAGGAATAGTGATAAGCTCATCGCT | |
| | CGTAAAAAGGACTGGGACCCGAAAAAGTACGGTGGCTTCGATAGCCCTACAGTTGCC | |
| | TATTCTGTCCTAGTAGTGGCAAAAGTTGAGAAGGGAAAATCCAAGAAACTGAAGTCA | |
| | GTCAAAGAATTATTGGGGATAACGATTATGGAGCGCTCGTCTTTTGAAAAGAACCCC | |
| | ATCGACTTCCTTGAGGCGAAAGGTTACAAGGAAGTAAAAAAGGATCTCATAATTAAA | |
| | CTACCAAAGTATAGTCTGTTTGAGTTAGAAAATGGCCGAAAACGGATGTTGGCTAGC | |
| | GCCGGAGAGCTTCAAAAGGGGAACGAACTCGCACTACCGTCTAAATACGTGAATTTC | |
| | CTGTATTTAGCGTCCCATTACGAGAAGTTGAAAGGTTCACCTGAAGATAACGAACAG | |
| | AAGCAACTTTTTGTTGAGCAGCACAAACATTATCTCGACGAAATCATAGAGCAAATT | |
| | TCGGAATTCAGTAAGAGAGTCATCCTAGCTGATGCCAATCTGGACAAAGTATTAAGC | |
| | GCATACAACAAGCACAGGGATAAACCCATACGTGAGCAGGCGGAAAATATTATCCAT | |
| | TTGTTTACTCTTACCAACCTCGGCGCTCCAGCCGCATTCAAGTATTTTGACACAACG | |
| | ATAGATCGCAAACGATACACTTCTACCAAGGAGGTGCTAGACGCGACACTGATTCAC | |
| | CAATCCATCACGGGATTATATGAAACTCGGATAGATTTGTCACAGCTTGGGGGTGAC | |
| | GGATCCCCCAAGAAGAAGAGGAAAGTCTCGAGCGACTACAAAGACCATGACGGTGAT | |
| | TATAAAGATCATGACATCGATTACAAGGATGACGATGACAAGGCTGCAGGA | |
| SpCas9 | MDKKYSIGLDIGTNSVGWAVITDEYKVPSKKFKVLGNTDRHSIKKNLIGALLFDSGE | SEQ ID NO: 68 |
| Streptococcus | TAEATRLKRTARRRYTRRKNRICYLQEIFSNEMAKVDDSFFHRLEESFLVEEDKKHE | |
| pyogenes | RHPIFGNIVDEVAYHEKYPTIYHLRKKLVDSTDKADLRLIYLALAHMIKFRGHFLIE | |
| wild type | GDLNPDNSDVDKLFIQLVQTYNQLFEENPINASGVDAKAILSARLSKSRRLENLIAQ | |
| Encoded | LPGEKKNGLFGNLIALSLGLTPNFKSNFDLAEDAKLQLSKDTYDDDLDNLLAQIGDQ | |
| product of | YADLFLAAKNLSDAILLSDILRVNTEITKAPLSASMIKRYDEHHQDLTLLKALVRQQ | |
| SWBC2D7W014 | LPEKYKEIFFDQSKNGYAGYIDGGASQEEFYKFIKPILEKMDGTEELLVKLNREDLL | |
| | RKQRTFDNGSIPHQIHLGELHAILRRQEDFYPFLKDNREKIEKILTFRIPYYVGPLA | |
| | RGNSRFAWMTRKSEETITPWNFEEVVDKGASAQSFIERMTNFDKNLPNEKVLPKHSL | |
| | LYEYFTVYNELTKVKYVTEGMRKPAFLSGEQKKAIVDLLFKTNRKVTVKQLKEDYFK | |
| | KIECFDSVEISGVEDRFNASLGTYHDLLKIIKDKDFLDNEENEDILEDIVLTLTLFE | |
| | DREMIEERLKTYAHLFDDKVMKQLKRRRYTGWGRLSRKLINGIRDKQSGKTILDFLK | |
| | SDGFANRNFMQLIHDDSLTFKEDIQKAQVSGQGDSLHEHIANLAGSPAIKKGILQTV | |
| | KVVDELVKVMGRHKPENIVIEMARENQTTQKGQKNSRERMKRIEEGIKELGSQILKE | |
| | HPVENTQLQNEKLYLYYLQNGRDMYVDQELDINRLSDYDVDHIVPQSFLKDDSIDNK | |
| | VLTRSDKNRGKSDNVPSEEVVKKMKNYWRQLLNAKLITQRKFDNLTKAERGGLSELD | |
| | KAGFIKRQLVETRQITKHVAQILDSRMNTKYDENDKLIREVKVITLKSKLVSDFRKD | |
| | FQFYKVREINNYHHAHDAYLNAVVGTALIKKYPKLESEFVYGDYKVYDVRKMIAKSE | |
| | QEIGKATAKYFFYSNIMNFFKTEITLANGEIRKRPLIETNGETGEIVWDKGRDFATV | |
| | RKVLSMPQVNIVKKTEVQTGGFSKESILPKRNSDKLIARKKDWDPKKYGGFDSPTVA | |
| | YSVLVVAKVEKGKSKKLKSVKELLGITIMERSSFEKNPIDFLEAKGYKEVKKDLIIK | |
| | LPKYSLFELENGRKRMLASAGELQKGNELALPSKYVNFLYLASHYEKLKGSPEDNEQ | |
| | KQLFVEQHKHYLDEIIEQISEFSKRVILADANLDKVLSAYNKHRDKPIREQAENIIH | |
| | LFTLTNLGAPAAFKYFDTTIDRKRYTSTKEVLDATLIHQSITGLYETRIDLSQLGGD | |
| | GSPKKKRKVSSDYKDHDGDYKDHDIDYKDDDDKAAG | |
| SpCas9 | ATGGATAAGAAATACTCAATAGGCTTAGATATCGGCACAAATAGCGTCGGATGGGCG | SEQ ID NO: 69 |
| Streptococcus | GTGATCACTGATGAATATAAGGTTCCGTCTAAAAAGTTCAAGGTTCTGGGAAATACA | |
| pyogenes | GACCGCCACAGTATCAAAAAAAATCTTATAGGGGCTCTTTTATTTGACAGTGGAGAG | |
| M1GAS wild | ACAGCGGAAGCGACTCGTCTCAAACGGACAGCTCGTAGAAGGTATACACGTCGGAAG | |
| type | AATCGTATTTGTTATCTACAGGAGATTTTTTCAAATGAGATGGCGAAAGTAGATGAT | |
| NC_002737.2 | AGTTTCTTTCATCGACTTGAAGAGTCTTTTTTGGTGGAAGAAGACAAGAAGCATGAA | |
| | CGTCATCCTATTTTTGGAAATATAGTAGATGAAGTTGCTTATCATGAGAAATATCCA | |
| | ACTATCTATCATCTGCGAAAAAAATTGGTAGATTCTACTGATAAAGCGGATTTGCGC | |
| | TTAATCTATTTGGCCTTAGCGCATATGATTAAGTTTCGTGGTCATTTTTTGATTGAG | |
| | GGAGATTTAAATCCTGATAATAGTGATGTGGACAAACTATTTATCCAGTTGGTACAA | |
| | ACCTACAATCAATTATTTGAAGAAAACCCTATTAACGCAAGTGGAGTAGATGCTAAA | |
| | GCGATTCTTTCTGCACGATTGAGTAAATCAAGACGATTAGAAAATCTCATTGCTCAG | |
| | CTCCCCGGTGAGAAGAAAAATGGCTTATTTGGGAATCTCATTGCTTTGTCATTGGGT | |
| | TTGACCCCTAATTTTAAATCAAATTTTGATTTGGCAGAAGATGCTAAATTACAGCTT | |
| | TCAAAAGATACTTACGATGATGATTTAGATAATTTATTGGCGCAAATTGGAGATCAA | |
| | TATGCTGATTTGTTTTTGGCAGCTAAGAATTTATCAGATGCTATTTTACTTTCAGAT | |
| | ATCCTAAGAGTAAATACTGAAATAACTAAGGCTCCCCTATCAGCTTCAATGATTAAA | |
| | CGCTACGATGAACATCATCAAGACTTGACTCTTTTAAAAGCTTTAGTTCGACAACAA | |
| | CTTCCAGAAAAGTATAAAGAAATCTTTTTTGATCAATCAAAAAACGGATATGCAGGT | |
| | TATATTGATGGGGGAGCTAGCCAAGAAGAATTTTATAAATTTATCAAACCAATTTTA | |
| | GAAAAAATGGATGGTACTGAGGAATTATTGGTGAAACTAAATCGTGAAGATTTGCTG | |
| | CGCAAGCAACGGACCTTTGACAACGGCTCTATTCCCCATCAAATTCACTTGGGTGAG | |
| | CTGCATGCTATTTTGAGAAGACAAGAAGACTTTTATCCATTTTTAAAAGACAATCGT | |
| | GAGAAGATTGAAAAAATCTTGACTTTTCGAATTCCTTATTATGTTGGTCCATTGGCG | |
| | CGTGGCAATAGTCGTTTTGCATGGATGACTCGGAAGTCTGAAGAAACAATTACCCCA | |
| | TGGAATTTTGAAGAAGTTGTCGATAAAGGTGCTTCAGCTCAATCATTTATTGAACGC | |
| | ATGACAAACTTTGATAAAAATCTTCCAAATGAAAAAGTACTACCAAAACATAGTTTG | |
| | CTTTATGAGTATTTTACGGTTTATAACGAATTGACAAAGGTCAAATATGTTACTGAA | |
| | GGAATGCGAAAACCAGCATTTCTTTCAGGTGAACAGAAGAAAGCCATTGTTGATTTA | |
| | CTCTTCAAAACAAATCGAAAAGTAACCGTTAAGCAATTAAAAGAAGATTATTTCAAA | |
| | AAAATAGAATGTTTTGATAGTGTTGAAATTTCAGGAGTTGAAGATAGATTTAATGCT | |
| | TCATTAGGTACCTACCATGATTTGCTAAAAATTATTAAAGATAAAGATTTTTTGGAT | |
| | AATGAAGAAAATGAAGATATCTTAGAGGATATTGTTTTAACATTGACCTTATTTGAA | |
| | GATAGGGAGATGATTGAGGAAAGACTTAAAACATATGCTCACCTCTTTGATGATAAG | |
| | GTGATGAAACAGCTTAAACGTCGCCGTTATACTGGTTGGGGACGTTTGTCTCGAAAA | |
| | TTGATTAATGGTATTAGGGATAAGCAATCTGGCAAAACAATATTAGATTTTTTGAAA | |
| | TCAGATGGTTTTGCCAATCGCAATTTTATGCAGCTGATCCATGATGATAGTTTGACA | |
| | TTTAAAGAAGACATTCAAAAAGCACAAGTGTCTGGACAAGGCGATAGTTTACATGAA | |
| | CATATTGCAAATTTAGCTGGTAGCCCTGCTATTAAAAAAGGTATTTTACAGACTGTA | |
| | AAAGTTGTTGATGAATTGGTCAAAGTAATGGGGCGGCATAAGCCAGAAAATATCGTT | |
| | ATTGAAATGGCACGTGAAAATCAGACAACTCAAAAGGGCCAGAAAAATTCGCGAGAG | |
| | CGTATGAAACGAATCGAAGAAGGTATCAAAGAATTAGGAAGTCAGATTCTTAAAGAG | |
| | CATCCTGTTGAAAATACTCAATTGCAAAATGAAAAGCTCTATCTCTATTATCTCCAA | |
| | AATGGAAGAGACATGTATGTGGACCAAGAATTAGATATTAATCGTTTAAGTGATTAT | |
| | GATGTCGATCACATTGTTCCACAAAGTTTCCTTAAAGACGATTCAATAGACAATAAG | |
| | GTCTTAACGCGTTCTGATAAAAATCGTGGTAAATCGGATAACGTTCCAAGTGAAGAA | |
| | GTAGTCAAAAAGATGAAAAACTATTGGAGACAACTTCTAAACGCCAAGTTAATCACT | |
| | CAACGTAAGTTTGATAATTTAACGAAAGCTGAACGTGGAGGTTTGAGTGAACTTGAT | |
| | AAAGCTGGTTTTATCAAACGCCAATTGGTTGAAACTCGCCAAATCACTAAGCATGTG | |
| | GCACAAATTTTGGATAGTCGCATGAATACTAAATACGATGAAAATGATAAACTTATT | |
| | CGAGAGGTTAAAGTGATTACCTTAAAATCTAAATTAGTTTCTGACTTCCGAAAAGAT | |
| | TTCCAATTCTATAAAGTACGTGAGATTAACAATTACCATCATGCCCATGATGCGTAT | |
| | CTAAATGCCGTCGTTGGAACTGCTTTGATTAAGAAATATCCAAAACTTGAATCGGAG | |
| | TTTGTCTATGGTGATTATAAAGTTTATGATGTTCGTAAAATGATTGCTAAGTCTGAG | |
| | CAAGAAATAGGCAAAGCAACCGCAAAATATTTCTTTTACTCTAATATCATGAACTTC | |
| | TTCAAAACAGAAATTACACTTGCAAATGGAGAGATTCGCAAACGCCCTCTAATCGAA | |
| | ACTAATGGGGAAACTGGAGAAATTGTCTGGGATAAAGGGCGAGATTTTGCCACAGTG | |
| | CGCAAAGTATTGTCCATGCCCCAAGTCAATATTGTCAAGAAAACAGAAGTACAGACA | |
| | GGCGGATTCTCCAAGGAGTCAATTTTACCAAAAAGAAATTCGGACAAGCTTATTGCT | |
| | CGTAAAAAAGACTGGGATCCAAAAAAATATGGTGGTTTTGATAGTCCAACGGTAGCT | |
| | TATTCAGTCCTAGTGGTTGCTAAGGTGGAAAAAGGGAAATCGAAGAAGTTAAAATCC | |
| | GTTAAAGAGTTACTAGGGATCACAATTATGGAAAGAAGTTCCTTTGAAAAAAATCCG | |
| | ATTGACTTTTTAGAAGCTAAAGGATATAAGGAAGTTAAAAAAGACTTAATCATTAAA | |
| | CTACCTAAATATAGTCTTTTTGAGTTAGAAAACGGTCGTAAACGGATGCTGGCTAGT | |
| | GCCGGAGAATTACAAAAAGGAAATGAGCTGGCTCTGCCAAGCAAATATGTGAATTTT | |
| | TTATATTTAGCTAGTCATTATGAAAAGTTGAAGGGTAGTCCAGAAGATAACGAACAA | |
| | AAACAATTGTTTGTGGAGCAGCATAAGCATTATTTAGATGAGATTATTGAGCAAATC | |
| | AGTGAATTTTCTAAGCGTGTTATTTTAGCAGATGCCAATTTAGATAAAGTTCTTAGT | |
| | GCATATAACAAACATAGAGACAAACCAATACGTGAACAAGCAGAAAATATTATTCAT | |
| | TTATTTACGTTGACGAATCTTGGAGCTCCCGCTGCTTTTAAATATTTTGATACAACA | |
| | ATTGATCGTAAACGATATACGTCTACAAAAGAAGTTTTAGATGCCACTCTTATCCAT | |
| | CAATCCATCACTGGTCTTTATGAAACACGCATTGATTTGAGTCAGCTAGGAGGTGAC | |
| | TGA | |
| SpCas9 | MDKKYSIGLDIGTNSVGWAVITDEYKVPSKKFKVLGNTDRHSIKKNLIGALLFDSGE | SEQ ID NO: 70 |
| Streptococcus | TAEATRLKRTARRRYTRRKNRICYLQEIFSNEMAKVDDSFFHRLEESFLVEEDKKHE | |
| pyogenes | RHPIFGNIVDEVAYHEKYPTIYHLRKKLVDSTDKADLRLIYLALAHMIKFRGHFLIE | |
| M1GAS wild | GDLNPDNSDVDKLFIQLVQTYNQLFEENPINASGVDAKAILSARLSKSRRLENLIAQ | |
| type | LPGEKKNGLFGNLIALSLGLTPNFKSNFDLAEDAKLQLSKDTYDDDLDNLLAQIGDQ | |
| Encoded | YADLFLAAKNLSDAILLSDILRVNTEITKAPLSASMIKRYDEHHQDLTLLKALVRQQ | |
| product of | LPEKYKEIFFDQSKNGYAGYIDGGASQEEFYKFIKPILEKMDGTEELLVKLNREDLL | |
| NC_002737.2 | RKQRTFDNGSIPHQIHLGELHAILRRQEDFYPFLKDNREKIEKILTFRIPYYVGPLA | |
| (100% | RGNSRFAWMTRKSEETITPWNFEEVVDKGASAQSFIERMTNFDKNLPNEKVLPKHSL | |
| identical to | LYEYFTVYNELTKVKYVTEGMRKPAFLSGEQKKAIVDLLFKTNRKVTVKQLKEDYFK | |
| the | KIECFDSVEISGVEDRFNASLGTYHDLLKIIKDKDFLDNEENEDILEDIVLTLTLFE | |
| canonical | DREMIEERLKTYAHLFDDKVMKQLKRRRYTGWGRLSRKLINGIRDKQSGKTILDFLK | |
| Q99ZW2 | SDGFANRNFMQLIHDDSLTFKEDIQKAQVSGQGDSLHEHIANLAGSPAIKKGILQTV | |
| wild type) | KVVDELVKVMGRHKPENIVIEMARENQTTQKGQKNSRERMKRIEEGIKELGSQILKE | |
| | HPVENTQLQNEKLYLYYLQNGRDMYVDQELDINRLSDYDVDHIVPQSFLKDDSIDNK | |
| | VLTRSDKNRGKSDNVPSEEVVKKMKNYWRQLLNAKLITQRKFDNLTKAERGGLSELD | |
| | KAGFIKRQLVETRQITKHVAQILDSRMNTKYDENDKLIREVKVITLKSKLVSDFRKD | |
| | FQFYKVREINNYHHAHDAYLNAVVGTALIKKYPKLESEFVYGDYKVYDVRKMIAKSE | |
| | QEIGKATAKYFFYSNIMNFFKTEITLANGEIRKRPLIETNGETGEIVWDKGRDFATV | |
| | RKVLSMPQVNIVKKTEVQTGGFSKESILPKRNSDKLIARKKDWDPKKYGGFDSPTVA | |
| | YSVLVVAKVEKGKSKKLKSVKELLGITIMERSSFEKNPIDFLEAKGYKEVKKDLIIK | |
| | LPKYSLFELENGRKRMLASAGELQKGNELALPSKYVNFLYLASHYEKLKGSPEDNEQ | |
| | KQLFVEQHKHYLDEIIEQISEFSKRVILADANLDKVLSAYNKHRDKPIREQAENIIH | |
| | LFTLTNLGAPAAFKYFDTTIDRKRYTSTKEVLDATLIHQSITGLYETRIDLSQLGGD | |

[0126] The base editors described herein may include any of the above SpCas9 sequences, or any variant thereof having at least 80%, at least 85%, at least 90%, at least 95%, or at least 99% sequence identity thereto.

[0127] Wild Type Cas9 Orthologs

[0128] In other embodiments, the Cas9 protein can be a wild type Cas9 ortholog from another bacterial species. For example, the following Cas9 orthologs can be used in connection with the base editor constructs described in this disclosure. In addition, any variant Cas9 orthologs having at least 80%, at least 85%, at least 90%, at least 95%, or at least 99% sequence identity to any of the below orthologs may also be used with the disclosed base editors.

| Description | Sequence |
|---|---|
| LfCas9 | 1 MKEYHIGLDI GTSSIGWAVT DSQFKLMRIK GKTAIGVRLF EEGKTAAERR TFRTTRRRLK |
| Lactobacillus | 61 RRKWRLHYLD EIFAPHLQEV DENFLRRLKQ SNIHPEDPTK NQAFIGKLLF PDLLKKNERG |
| fermentum | 121 YPTLIKMRDE LPVEQRAHYP VMNIYKLREA MINEDRQFDL REVYLAVHHI VKYRGHFLNN |
| wild type | 181 ASVDKFKVGR IDFDKSFNVL NEAYEELQNG EGSFTIEPSK VEKIGQLLLD TKMRKLDRQK |
| GenBank: | 241 AVAKLLEVKV ADKEETKRNK QIATAMSKLV LGYKADFATV AMANGNEWKI DLSSETSEDE |
| SNX31424.1 1 | 301 IEKFREELSD AQNDILTEIT SLFSQIMLNE IVPNGMSISE SMMDRYWTHE RQLAEVKEYL |
| | 361 ATQPASARKE FDQVYNKYIG QAPKERGFDL EKGLKKILSK KENWKEIDEL LKAGDFLPKQ |
| | 421 RTSANGVIPH QMHQQELDRI IEKQAKYYPW LATENPATGE RDRHQAKYEL DQLVSFRIPY |
| | 481 YVGPLVTPEV QKATSGAKFA WAKRKEDGEI TPWNLWDKID RAESAEAFIK RMTVKDTYLL |
| | 541 NEDVLPANSL LYQKYNVLNE LNNVRVNGRR LSVGIKQDIY TELFKKKKTV KASDVASLVM |
| | 601 AKTRGVNKPS VEGLSDPKKF NSNLATYLDL KSIVGDKVDD NRYQTDLENI IEWRSVFEDG |
| | 661 EIFADKLTEV EWLTDEQRSA LVKKRYKGWG RLSKKLLTGI VDENGQRIID LMWNTDQNFK |
| | 721 EIVDQPVFKE QIDQLNQKAI TNDGMTLRER VESVLDDAYT SPQNKKAIWQ VVRVVEDIVK |
| | 781 AVGNAPKSIS IEFARNEGNK GEITRSRRTQ LQKLFEDQAH ELVKDTSLTE ELEKAPDLSD |
| | 841 RYYFYFTQGG KDMYTGDPIN FDEISTKYDI DHILPQSFVK DNSLDNRVLT SRKENNKKSD |
| | 901 QVPAKLYAAK MKPYWNQLLK QGLITQRKFE NLTKDVDQNI KYRSLGFVKR QLVETRQVIK |
| | 961 LTANILGSMY QEAGTEIIET RAGLTKQLRE EFDLPKVREV NDYHHAVDAY LTTFAGQYLN |
| | 1021 RRYPKLRSFF VYGEYMKFKH GSDLKLRNFN FFHELMEGDK SQGKVVDQQT GELITTRDEV |
| | 1081 AKSFDRLLNM KYMLVSKEVH DRSDQLYGAT IVTAKESGKL TSPIEIKKNR LVDLYGAYTN |
| | 1141 GTSAFMTIIK FTGNKPKYKV IGIPTTSAAS LKRAGKPGSE SYNQELHRII KSNPKVKKGF |
| | 1201 EIVVPHVSYG QLIVDGDCKF TLASPTVQHP ATQLVLSKKS LETISSGYKI LKDKPAIANE |
| | 1261 RLIRVFDEVV GQMNRYFTIF DQRSNRQKVA DARDKFLSLP TESKYEGAKK VQVGKTEVIT |
| | 1321 NLLMGLHANA TQGDLKVLGL ATFGFFQSTT GLSLSEDTMI VYQSPTGLFE RRICLKDI |
| | (SEQ ID NO: 71) |
| SaCas9 | MDKKYSIGLD IGTNSVGWAV ITDEYKVPSK KFKVLGNTDR HSIKKNLIGA LLFDSGETAE |
| Staphylo- | ATRLKRTARR RYTRRKNRIC YLQEIFSNEM AKVDDSFFHR LEESFLVEED KKHERHPIFG |
| coccus | NIVDEVAYHE KYPTIYHLRK KLVDSTDKAD LRLIYLALAH MIKFRGHFLI EGDLNPDNSD |
| aureus wild | VDKLFIQLVQ TYNQLFEENP INASGVDAKA ILSARLSKSR RLENLIAQLP GEKKNGLFGN |
| type | LIALSLGLTP NFKSNFDLAE DAKLQLSKDT YDDDLDNLLA QIGDQYADLF LAAKNLSDAI |
| GenBank: | LLSDILRVNT EITKAPLSAS MIKRYDEHHQ DLTLLKALVR QQLPEKYKEI FFDQSKNGYA |
| AYD60528.1 | GYIDGGASQE EFYKFIKPIL EKMDGTEELL VKLNREDLLR KQRTFDNGSI PHQIHLGELH |
| | AILRRQEDFY PFLKDNREKI EKILTFRIPY YVGPLARGNS RFAWMTRKSE ETITPWNFEE |
| | VVDKGASAQS FIERMTNFDK NLPNEKVLPK HSLLYEYFTV YNELTKVKYV TEGMRKPAFL |
| | SGEQKKAIVD LLFKTNRKVT VKQLKEDYFK KIECFDSVEI SGVEDRFNAS LGTYHDLLKI |
| | IKDKDFLDNE ENEDILEDIV LTLTLFEDRE MIEERLKTYA HLFDDKVMKQ LKRRRYTGWG |
| | RLSRKLINGI RDKQSGKTIL DFLKSDGFAN RNFMQLIHDD SLTFKEDIQK AQVSGQGDSL |
| | HEHIANLAGS PAIKKGILQT VKVVDELVKV MGRHKPENIV IEMARENQTT QKGQKNSRER |
| | MKRIEEGIKE LGSQILKEHP VENTQLQNEK LYLYYLQNGR DMYVDQELDI NRLSDYDVDH |
| | IVPQSFLKDD SIDNKVLTRS DKNRGKSDNV PSEEVVKKMK NYWRQLLNAK LITQRKFDNL |
| | TKAERGGLSE LDKAGFIKRQ LVETRQITKH VAQILDSRMN TKYDENDKLI REVKVITLKS |
| | KLVSDFRKDF QFYKVREINN YHHAHDAYLN AVVGTALIKK YPKLESEFVY GDYKVYDVRK |
| | MIAKSEQEIG KATAKYFFYS NIMNFFKTEI TLANGEIRKR PLIETNGETG EIVWDKGRDF |
| | ATVRKVLSMP QVNIVKKTEV QTGGFSKESI LPKRNSDKLI ARKKDWDPKK YGGFDSPTVA |
| | YSVLVVAKVE KGKSKKLKSV KELLGITIME RSSFEKNPID FLEAKGYKEV KKDLIIKLPK |
| | YSLFELENGR KRMLASAGEL QKGNELALPS KYVNFLYLAS HYEKLKGSPE DNEQKQLFVE |
| | QHKHYLDEII EQISEFSKRV ILADANLDKV LSAYNKHRDK PIREQAENII HLFTLTNLGA |
| | PAAFKYFDTT IDRKRYTSTK EVLDATLIHQ SITGLYETRI DLSQLGGD |
| | (SEQ ID NO: 72) |
| SaCas9 | MGKRNYILGLDIGITSVGYGIIDYETRDVIDAGVRLFKEANVENNEGRRSKRGARRLKRRRRHRIQRVKK |
| Staphylo- | LLFDYNLLTDHSELSGINPYEARVKGLSQKLSEEEFSAALLHLAKRRGVHNVNEVEEDTGNELSTKEQIS |
| coccus | RNSKALEEKYVAELQLERLKKDGEVRGSINREKTSDYVKEAKQLLKVQKAYHQLDQSFIDTYIDLLETRR |
| aureus | TYYEGPGEGSPFGWKDIKEWYEMLMGHCTYFPEELRSVKYAYNADLYNALNDLNNLVITRDENEKLEYYE |
| | KFQIIENVEKQKKKPTLKQTAKEILVNEEDIKGYRVTSTGKPEFTNLKVYHDIKDITARKEIIENAELLD |
| | QTAKILTIYQSSEDIQEELTNLNSELTQEEIEQISNLKGYTGTHNLSLKAINLILDELWHTNDNQIAIEN |
| | RLKLVPKKVDLSQQKEIPTTLVDDFILSPVVKRSFIQSIKVINAIIKKYGLPNDIIIELAREKNSKDAQK |
| | MINEMQKRNRQTNERIEEIIRTTGKENAKYLIEKIKLHDMQEGKCLYSLEAIPLEDLLNNPFNYEVDHII |
| | PRSVSFDNSFNNKVLVKQEENSKKGNRTPFQYLSSSDSKISYETFKKHILNLAKGKGRISKTKKEYLLEE |
| | RDINRFSVQKDFINRNLVDTRYATRGLMNLLRSYFRVNNLDVKVKSINGGFTSFLRRKWKFKKERNKGYK |
| | HHAEDALIIANADFIFKEWKKLDKAKKVMENQMFEEKQAESMPEIETEQEYKEIFITPHQIKHIKDFKDY |
| | KYSHRVDKKPNRKLINDTLYSTRKDDKGNTLIVNNLNGLYDKDNDKLKKLINKSPEKLLMYHHDPQTYQK |
| | LKLIMEQYGDEKNPLYKYYEETGNYLTKYSKKDNGPVIKKIKYYGNKLNAHLDITDDYPNSRNKVVKLSL |
| | KPYREDVYLDNGVYKEVTVKNLDVIKKENYYEVNSKCYEEAKKLKKISNQAEFIASFYKNDLIKINGELY |
| | RVIGVNNDLLNRIEVNMIDITYREYLENMNDKRPPHIIKTIASKTQSIKKYSTDILGNLYEVKSKKHPQI |
| | IKK |
| | (SEQ ID NO: 73) |
| StCas9 | 1 MLFNKCIIIS INLDFSNKEK CMTKPYSIGL DIGTNSVGWA VITDNYKVPS KKMKVLGNTS |
| Streptococcus | 61 KKYIKKNLLG VLLFDSGITA EGRRLKRTAR RRYTRRRNRI LYLQEIFSTE MATLDDAFFQ |
| thermophilus | 121 RLDDSFLVPD DKRDSKYPIF GNLVEEKVYH DEFPTIYHLR KYLADSTKKA DLRLVYLALA |
| UniProtKB/ | 181 HMIKYRGHFL IEGEFNSKNN DIQKNFQDFL DTYNAIFESD LSLENSKQLE EIVKDKISKL |
| Swiss-Prot: | 241 EKKDRILKLF PGEKNSGIFS EFLKLIVGNQ ADFRKCFNLD EKASLHFSKE SYDEDLETLL |
| G3ECR1.2 | 301 GYIGDDYSDV FLKAKKLYDA ILLSGFLTVT DNETEAPLSS AMIKRYNEHK EDLALLKEYI |
| Wild type | 361 RNISLKTYNE VFKDDTKNGY AGYIDGKTNQ EDFYVYLKNL LAEFEGADYF LEKIDREDFL |
| | 421 RKQRTFDNGS IPYQIHLQEM RAILDKQAKF YPFLAKNKER IEKILTFRIP YYVGPLARGN |
| | 481 SDFAWSIRKR NEKITPWNFE DVIDKESSAE AFINRMTSFD LYLPEEKVLP KHSLLYETFN |
| | 541 VYNELTKVRF IAESMRDYQF LDSKQKKDIV RLYFKDKRKV TDKDIIEYLH AIYGYDGIEL |
| | 601 KGIEKQFNSS LSTYHDLLNI INDKEFLDDS SNEATIEEII HTLTIFEDRE MIKQRLSKFE |
| | 661 NIFDKSVLKK LSRRHYTGWG KLSAKLINGI RDEKSGNTIL DYLIDDGISN RNFMQLIHDD |
| | 721 ALSFKKKIQK AQIIGDEDKG NIKEVVKSLP GSPAIKKGIL QSIKIVDELV KVMGGRKPES |
| | 781 IVVEMARENQ YTNQGKSNSQ QRLKRLEKSL KELGSKILKE NIPAKLSKID NNALQNDRLY |
| | 841 LYYLQNGKDM YTGDDLDIDR LSNYDIDHII PQAFLKDNSI DNKVLVSSAS NRGKSDDFPS |
| | 901 LEVVKKRKTF WYQLLKSKLI SQRKFDNLTK AERGGLLPED KAGFIQRQLV ETRQITKHVA |
| | 961 RLLDEKFNNK KDENNRAVRT VKIITLKSTL VSQFRKDFEL YKVREINDFH HAHDAYLNAV |
| | 1021 IASALLKKYP KLEPEFVYGD YPKYNSFRER KSATEKVYFY SNIMNIFKKS ISLADGRVIE |
| | 1081 RPLIEVNEET GESVWNKESD LATVRRVLSY PQVNVVKKVE EQNHGLDRGK PKGLFNANLS |
| | 1141 SKPKPNSNEN LVGAKEYLDP KKYGGYAGIS NSFAVLVKGT IEKGAKKKIT NVLEFQGISI |
| | 1201 LDRINYRKDK LNFLLEKGYK DIELIIELPK YSLFELSDGS RRMLASILST NNKRGEIHKG |
| | 1261 NQIFLSQKFV KLLYHAKRIS NTINENHRKY VENHKKEFEE LFYYILEFNE NYVGAKKNGK |
| | 1321 LLNSAFQSWQ NHSIDELCSS FIGPTGSERK GLFELTSRGS AADFEFLGVK IPRYRDYTPS |
| | 1381 SLLKDATLIH QSVTGLYETR IDLAKLGEG |
| | (SEQ ID NO: 74) |
| LcCas9 | 1 MKIKNYNLAL TPSTSAVGHV EVDDDLNILE PVHHQKAIGV AKFGEGETAE ARRLARSARR |
| Lactobacillus | 61 TTKRRANRIN HYFNEIMKPE IDKVDPLMFD RIKQAGLSPL DERKEFRTVI FDRPNIASYY |
| crispatus | 121 HNQFPTIWHL QKYLMITDEK ADIRLIYWAL HSLLKHRGHF FNTTPMSQFK PGKLNLKDDM |
| NCBI | 181 LALDDYNDLE GLSFAVANSP EIEKVIKDRS MHKKEKIAEL KKLIVNDVPD KDLAKRNNKI |
| Reference | 241 ITQIVNAIMG NSFHLNFIFD MDLDKLTSKA WSFKLDDPEL DTKFDAISGS MTDNQIGIFE |
| Sequence: | 301 TLQKIYSAIS LLDILNGSSN VVDAKNALYD KHKRDLNLYF KFLNTLPDEI AKTLKAGYTL |
| WP_ | 361 YIGNRKKDLL AARKLLKVNV AKNFSQDDFY KLINKELKSI DKQGLQTRFS EKVGELVAQN |
| 133478044.1 | 421 NFLPVQRSSD NVFIPYQLNA ITFNKILENQ GKYYDFLVKP NPAKKDRKNA PYELSQLMQF |
| Wild type | 481 TIPYYVGPLV TPEEQVKSGI PKTSRFAWMV RKDNGAITPW NFYDKVDIEA TADKFIKRSI |
| | 541 AKDSYLLSEL VLPKHSLLYE KYEVFNELSN VSLDGKKLSG GVKQILFNEV FKKTNKVNTS |
| | 601 RILKALAKHN IPGSKITGLS NPEEFTSSLQ TYNAWKKYFP NQIDNFAYQQ DLEKMIEWST |
| | 661 VFEDHKILAK KLDEIEWLDD DQKKFVANTR LRGWGRLSKR LLTGLKDNYG KSIMQRLETT |
| | 721 KANFQQIVYK PEFREQIDKI SQAAAKNQSL EDILANSYTS PSNRKAIRKT MSVVDEYIKL |
| | 781 NHGKEPDKIF LMFQRSEQEK GKQTEARSKQ LNRILSQLKA DKSANKLFSK QLADEFSNAI |
| | 841 KKSKYKLNDK QYFYFQQLGR DALTGEVIDY DELYKYTVLH IIPRSKLTDD SQNNKVLTKY |
| | 901 KIVDGSVALK FGNSYSDALG MPIKAFWTEL NRLKLIPKGK LLNLTTDFST LNKYQRDGYI |
| | 961 ARQLVETQQI VKLLATIMQS RFKHTKIIEV RNSQVANIRY QFDYFRIKNL NEYYRGFDAY |
| | 1021 LAAVVGTYLY KVYPKARRLF VYGQYLKPKK TNQENQDMHL DSEKKSQGFN FLWNLLYGKQ |
| | 1081 DQIFVNGTDV IAFNRKDLIT KMNTVYNYKS QKISLAIDYH NGAMFKATLF PRNDRDTAKT |
| | 1141 RKLIPKKKDY DTDIYGGYTS NVDGYMLLAE IIKRDGNKQY GFYGVPSRLV SELDTLKKTR |
| | 1201 YTEYEEKLKE IIKPELGVDL KKIKKIKILK NKVPFNQVII DKGSKFFITS TSYRWNYRQL |
| | 1261 ILSAESQQTL MDLVVDPDFS NHKARKDARK NADERLIKVY EEILYQVKNY MPMFVELHRC |
| | 1321 YEKLVDAQKT FKSLKISDKA MVLNQILILL HSNATSPVLE KLGYHTRFTL GKKHNLISEN |
| | 1381 AVLVTQSITG LKENHVSIKQ ML |
| | (SEQ ID NO: 75) |
| PdCas9 | 1 MTNEKYSIGL DIGTSSIGFA VVNDNNRVIR VKGKNAIGVR LFDEGKAAAD RRSFRTTRRS |
| Pedicoccus | 61 FRTTRRRLSR RRWRLKLLRE IFDAYITPVD EAFFIRLKES NLSPKDSKKQ YSGDILFNDR |
| damnosus | 121 SDKDFYEKYP TIYHLRNALM TEHRKFDVRE IYLAIHHIMK FRGHFLNATP ANNFKVGRLN |
| NCBI | 181 LEEKFEELND IYQRVFPDES IEFRTDNLEQ IKEVLLDNKR SRADRQRTLV SDIYQSSEDK |
| Reference | 241 DIEKRNKAVA TEILKASLGN KAKLNVITNV EVDKEAAKEW SITFDSESID DDLAKIEGQM |
| Sequence: | 301 TDDGHEIIEV LRSLYSGITL SAIVPENHTL SQSMVAKYDL HKDHLKLFKK LINGMTDTKK |
| WP_ | 361 AKNLRAAYDG YIDGVKGKVL PQEDFYKQVQ VNLDDSAEAN EIQTYIDQDI FMPKQRTKAN |
| 062913273.1 | 421 GSIPHQLQQQ ELDQIIENQK AYYPWLAELN PNPDKKRQQL AKYKLDELVT FRVPYYVGPM |
| Wild type | 481 ITAKDQKNQS GAEFAWMIRK EPGNITPWNF DQKVDRMATA NQFIKRMTTT DTYLLGEDVL |
| | 541 PAQSLLYQKF EVLNELNKIR IDHKPISIEQ KQQIFNDLFK QFKNVTIKHL QDYLVSQGQY |
| | 601 SKRPLIEGLA DEKRFNSSLS TYSDLCGIFG AKLVEENDRQ EDLEKIIEWS TIFEDKKIYR |
| | 661 AKLNDLTWLT DDQKEKLATK RYQGWGRLSR KLLVGLKNSE HRNIMDILWI TNENFMQIQA |
| | 721 EPDFAKLVTD ANKGMLEKTD SQDVINDLYT SPQNKKAIRQ ILLVVHDIQN AMHGQAPAKI |
| | 781 HVEFARGEER NPRRSVQRQR QVEAAYEKVS NELVSAKVRQ EFKEAINNKR DFKDRLFLYF |
| | 841 MQGGIDIYTG KQLNIDQLSS YQIDHILPQA FVKDDSLTNR VLTNENQVKA DSVPIDIFGK |
| | 901 KMLSVWGRMK DQGLISKGKY RNLTMNPENI SAHTENGFIN RQLVETRQVI KLAVNILADE |
| | 961 YGDSTQIISV KADLSHQMRE DFELLKNRDV NDYHHAFDAY LAAFIGNYLL KRYPKLESYF |
| | 1021 VYGDFKKFTQ KETKMRRENF IYDLKHCDQV VNKETGEILW TKDEDIKYIR HLFAYKKILV |
| | 1081 SHEVREKRGA LYNQTIYKAK DDKGSGQESK KLIRIKDDKE TKIYGGYSGK SLAYMTIVQI |
| | 1141 TKKNKVSYRV IGIPTLALAR LNKLENDSTE NNGELYKIIK PQFTHYKVDK KNGEIIETTD |
| | 1201 DFKIVVSKVR FQQLIDDAGQ FFMLASDTYK NNAQQLVISN NALKAINNTN ITDCPRDDLE |
| | 1261 RLDNLRLDSA FDEIVKKMDK YFSAYDANNF REKIRNSNLI FYQLPVEDQW ENNKITELGK |
| | 1321 RTVLTRILQG LHANATTTDM SIFKIKTPFG QLRQRSGISL SENAQLIYQS PTGLFERRVQ |
| | 1381 LNKIK |
| | (SEQ ID NO: 76) |
| FnCas9 | 1 MKKQKFSDYY LGFDIGTNSV GWCVTDLDYN VLRFNKKDMW GSRLFEEAKT AAERRVQRNS |
| Fusobacterium | 61 RRRLKRRKWR LNLLEEIFSN EILKIDSNFF RRLKESSLWL EDKSSKEKFT LFNDDNYKDY |
| nucleatum | 121 DFYKQYPTIF HLRNELIKNP EKKDIRLVYL AIHSIFKSRG HFLFEGQNLK EIKNFETLYN |
| NCBI | 181 NLIAFLEDNG INKIIDKNNI EKLEKIVCDS KKGLKDKEKE FKEIFNSDKQ LVAIFKLSVG |
| Reference | 241 SSVSLNDLFD TDEYKKGEVE KEKISFREQI YEDDKPIYYS ILGEKIELLD IAKTFYDFMV |
| Sequence: | 301 LNNILADSQY ISEAKVKLYE EHKKDLKNLK YIIRKYNKGN YDKLFKDKNE NNYSAYIGLN |
| WP_ | 361 KEKSKKEVIE KSRLKIDDLI KNIKGYLPKV EEIEEKDKAI FNKILNKIEL KTILPKQRIS |
| 060798984.1 | 421 DNGTLPYQIH EAELEKILEN QSKYYDFLNY EENGIITKDK LLMTFKFRIP YYVGPLNSYH |
| | 481 KDKGGNSWIV RKEEGKILPW NFEQKVDIEK SAEEFIKRMT NKCTYLNGED VIPKDTFLYS |
| | 541 EYVILNELNK VQVNDEFLNE ENKRKIIDEL FKENKKVSEK KFKEYLLVKQ IVDGTIELKG |
| | 601 VKDSFNSNYI SYIRFKDIFG EKLNLDIYKE ISEKSILWKC LYGDDKKIFE KKIKNEYGDI |
| | 661 LTKDEIKKIN TFKFNNWGRL SEKLLTGIEF INLETGECYS SVMDALRRTN YNLMELLSSK |
| | 721 FTLQESINNE NKEMNEASYR DLIEESYVSP SLKRAIFQTL KIYEEIRKIT GRVPKKVFIE |
| | 781 MARGGDESMK NKKIPARQEQ LKKLYDSCGN DIANFSIDIK EMKNSLISYD NNSLRQKKLY |
| | 841 LYYLQFGKCM YTGREIDLDR LLQNNDTYDI DHIYPRSKVI KDDSFDNLVL VLKNENAEKS |
| | 901 NEYPVKKEIQ EKMKSFWRFL KEKNFISDEK YKRLTGKDDF ELRGFMARQL VNVRQTTKEV |
| | 961 GKILQQIEPE IKIVYSKAEI ASSFREMFDF IKVRELNDTH HAKDAYLNIV AGNVYNTKFT |
| | 1021 EKPYRYLQEI KENYDVKKIY NYDIKNAWDK ENSLEIVKKN MEKNTVNITR FIKEKKGQLF |
| | 1081 DLNPIKKGET SNEIISIKPK VYNGKDDKLN EKYGYYKSLN PAYFLYVEHK EKNKRIKSFE |
| | 1141 RVNLVDVNNI KDEKSLVKYL IENKKLVEPR VIKKVYKRQV ILINDYPYSI VTLDSNKLMD |
| | 1201 FENLKPLFLE NKYEKILKNV IKFLEDNQGK SEENYKFIYL KKKDRYEKNE TLESVKDRYN |
| | 1261 LEFNEMYDKF LEKLDSKDYK NYMNNKKYQE LLDVKEKFIK LNLFDKAFTL KSFLDLFNRK |
| | 1321 TMADFSKVGL TKYLGKIQKI SSNVLSKNEL YLLEESVTGL FVKKIKL |
| | (SEQ ID NO: 77) |
| EcCas9 | 61 RRKQRIQILQ ELLGEEVLKT DPGFFHRMKE SRYVVEDKRT LDGKQVELPY ALFVDKDYTD |
| Enterococcus | 121 KEYYKQFPTI NHLIVYLMTT SDTPDIRLVY LALHYYMKNR GNFLHSGDIN NVKDINDILE |
| cecorum | 181 QLDNVLETFL DGWNLKLKSY VEDIKNIYNR DLGRGERKKA FVNTLGAKTK AEKAFCSLIS |
| NCBI | 241 GGSTNLAELF DDSSLKEIET PKIEFASSSL EDKIDGIQEA LEDRFAVIEA AKRLYDWKTL |
| Reference | 301 TDILGDSSSL AEARVNSYQM HHEQLLELKS LVKEYLDRKV FQEVFVSLNV ANNYPAYIGH |
| Sequence: | 361 TKINGKKKEL EVKRTKRNDF YSYVKKQVIE PIKKKVSDEA VLTKLSEIES LIEVDKYLPL |
| WP_ | 421 QVNSDNGVIP YQVKLNELTR IFDNLENRIP VLRENRDKII KTFKFRIPYY VGSLNGVVKN |
| 047338501.1 | 481 GKCTNWMVRK EEGKIYPWNF EDKVDLEASA EQFIRRMTNK CTYLVNEDVL PKYSLLYSKY |
| Wild type | 541 LVLSELNNLR IDGRPLDVKI KQDIYENVFK KNRKVTLKKI KKYLLKEGII TDDDELSGLA |
| | 601 DDVKSSLTAY RDFKEKLGHL DLSEAQMENI ILNITLFGDD KKLLKKRLAA LYPFIDDKSL |
| | 661 NRIATLNYRD WGRLSERFLS GITSVDQETG ELRTIIQCMY ETQANLMQLL AEPYHFVEAI |
| | 721 EKENPKVDLE SISYRIVNDL YVSPAVKRQI WQTLLVIKDI KQVMKHDPER IFIEMAREKQ |
| | 781 ESKKTKSRKQ VLSEVYKKAK EYEHLFEKLN SLTEEQLRSK KIYLYFTQLG KCMYSGEPID |
| | 841 FENLVSANSN YDIDHIYPQS KTIDDSFNNI VLVKKSLNAY KSNHYPIDKN IRDNEKVKTL |
| | 901 WNTLVSKGLI TKEKYERLIR STPFSDEELA GFIARQLVET RQSTKAVAEI LSNWFPESEI |
| | 961 VYSKAKNVSN FRQDFEILKV RELNDCHHAH DAYLNIVVGN AYHTKFTNSP YRFIKNKANQ |
| | 1021 EYNLRKLLQK VNKIESNGVV AWVGQSENNP GTIATVKKVI RRNTVLISRM VKEVDGQLFD |
| | 1081 LTLMKKGKGQ VPIKSSDERL TDISKYGGYN KATGAYFTFV KSKKRGKVVR SFEYVPLHLS |
| | 1141 KQFENNNELL KEYIEKDRGL TDVEILIPKV LINSLFRYNG SLVRITGRGD TRLLLVHEQP |
| | 1201 LYVSNSFVQQ LKSVSSYKLK KSENDNAKLT KTATEKLSNI DELYDGLLRK LDLPIYSYWF |
| | 1261 SSIKEYLVES RTKYIKLSIE EKALVIFEIL HLFQSDAQVP NLKILGLSTK PSRIRIQKNL |
| | 1321 KDTDKMSIIH QSPSGIFEHE IELTSL |
| | (SEQ ID NO: 78) |
| AhCas9 | 1 MQNGFLGITV SSEQVGWAVT NPKYELERAS RKDLWGVRLF DKAETAEDRR MFRTNRRLNQ |
| Anaerostipes | 61 RKKNRIHYLR DIFHEEVNQK DPNFFQQLDE SNFCEDDRTV EFNFDTNLYK NQFPTVYHLR |
| hadrus | 121 KYLMETKDKP DIRLVYLAFS KFMKNRGHFL YKGNLGEVMD FENSMKGFCE SLEKFNIDFP |
| NCBI | 181 TLSDEQVKEV RDILCDHKIA KTVKKKNIIT ITKVKSKTAK AWIGLFCGCS VPVKVLFQDI |
| Reference | 241 DEEIVTDPEK ISFEDASYDD YIANIEKGVG IYYEAIVSAK MLFDWSILNE ILGDHQLLSD |
| Sequence: | 301 AMIAEYNKHH DDLKRLQKII KGTGSRELYQ DIFINDVSGN YVCYVGHAKT MSSADQKQFY |
| WP_ | 361 TFLKNRLKNV NGISSEDAEW IDTEIKNGTL LPKQTKRDNS VIPHQLQLRE FELILDNMQE |
| 044924278.1 | 421 MYPFLKENRE KLLKIFNFVI PYYVGPLKGV VRKGESTNWM VPKKDGVIHP WNFDEMVDKE |
| Wild type | 481 ASAECFISRM TGNCSYLFNE KVLPKNSLLY ETFEVLNELN PLKINGEPIS VELKQRIYEQ |
| | 541 LFLTGKKVTK KSLTKYLIKN GYDKDIELSG IDNEFHSNLK SHIDFEDYDN LSDEEVEQII |
| | 601 LRITVFEDKQ LLKDYLNREF VKLSEDERKQ ICSLSYKGWG NLSEMLLNGI TVTDSNGVEV |
| | 661 SVMDMLWNTN LNLMQILSKK YGYKAEIEHY NKEHEKTIYN REDLMDYLNI PPAQRRKVNQ |
| | 721 LITIVKSLKK TYGVPNKIFF KISREHQDDP KRTSSRKEQL KYLYKSLKSE DEKHLMKELD |
| | 781 ELNDHELSND KVYLYFLQKG RCIYSGKKLN LSRLRKSNYQ NDIDYIYPLS AVNDRSMNNK |
| | 841 VLTGIQENRA DKYTYFPVDS EIQKKMKGFW MELVLQGFMT KEKYFRLSRE NDFSKSELVS |
| | 901 FIEREISDNQ QSGRMIASVL QYYFPESKIV FVKEKLISSF KRDFHLISSY GHNHLQAAKD |
| | 961 AYITIVVGNV YHTKFTMDPA IYFKNHKRKD YDLNRLFLEN ISRDGQIAWE SGPYGSIQTV |
| | 1021 RKEYAQNHIA VTKRVVEVKG GLFKQMPLKK GHGEYPLKTN DPRFGNIAQY GGYTNVTGSY |
| | 1081 FVLVESMEKG KKRISLEYVP VYLHERLEDD PGHKLLKEYL VDHRKLNHPK ILLAKVRKNS |
| | 1141 LLKIDGFYYR LNGRSGNALI LTNAVELIMD DWQTKTANKI SGYMKRRAID KKARVYQNEF |
| | 1201 HIQELEQLYD FYLDKLKNGV YKNRKNNQAE LIHNEKEQFM ELKTEDQCVL LTEIKKLFVC |
| | 1261 SPMQADLTLI GGSKHTGMIA MSSNVTKADF AVIAEDPLGL RNKVIYSHKG EK |
| | (SEQ ID NO: 79) |
| KvCas9 | 1 MSQNNNKIYN IGLDIGDASV GWAVVDEHYN LLKRHGKHMW GSRLFTQANT AVERRSSRST |
| Kandleria | 61 RRRYNKRRER IRLLREIMED MVLDVDPTFF IRLANVSFLD QEDKKDYLKE NYHSNYNLFI |
| vitulina | 121 DKDFNDKTYY DKYPTIYHLR KHLCESKEKE DPRLIYLALH HIVKYRGNFL YEGQKFSMDV |
| NCBI | 181 SNIEDKMIDV LRQFNEINLF EYVEDRKKID EVLNVLKEPL SKKHKAEKAF ALFDTTKDNK |
| Reference | 241 AAYKELCAAL AGNKFNVTKM LKEAELHDED EKDISFKFSD ATFDDAFVEK QPLLGDCVEF |
| Sequence: | 301 IDLLHDIYSW VELQNILGSA HTSEPSISAA MIQRYEDHKN DLKLLKDVIR KYLPKKYFEV |
| WP_ | 361 FRDEKSKKNN YCNYINHPSK TPVDEFYKYI KKLIEKIDDP DVKTILNKIE LESFMLKQNS |
| 031589969.1 | 421 RTNGAVPYQM QLDELNKILE NQSVYYSDLK DNEDKIRSIL TFRIPYYFGP LNITKDRQFD |
| Wild type | 481 WIIKKEGKEN ERILPWNANE IVDVDKTADE FIKRMRNFCT YFPDEPVMAK NSLTVSKYEV |
| | 541 LNEINKLRIN DHLIKRDMKD KMLHTLFMDH KSISANAMKK WLVKNQYFSN TDDIKIEGFQ |
| | 601 KENACSTSLT PWIDFTKIFG KINESNYDFI EKIIYDVTVF EDKKILRRRL KKEYDLDEEK |
| | 661 IKKILKLKYS GWSRLSKKLL SGIKTKYKDS TRTPETVLEV MERTNMNLMQ VINDEKLGFK |
| | 721 KTIDDANSTS VSGKFSYAEV QELAGSPAIK RGIWQALLIV DEIKKIMKHE PAHVYIEFAR |
| | 781 NEDEKERKDS FVNQMLKLYK DYDFEDETEK EANKHLKGED AKSKIRSERL KLYYTQMGKC |
| | 841 MYTGKSLDID RLDTYQVDHI VPQSLLKDDS IDNKVLVLSS ENQRKLDDLV IPSSIRNKMY |
| | 901 GFWEKLFNNK IISPKKFYSL IKTEFNEKDQ ERFINRQIVE TRQITKHVAQ IIDNHYENTK |
| | 961 VVTVRADLSH QFRERYHIYK NRDINDFHHA HDAYIATILG TYIGHRFESL DAKYIYGEYK |
| | 1021 RIFRNQKNKG KEMKKNNDGF ILNSMRNIYA DKDTGEIVWD PNYIDRIKKC FYYKDCFVTK |
| | 1081 KLEENNGTFF NVTVLPNDTN SDKDNTLATV PVNKYRSNVN KYGGFSGVNS FIVAIKGKKK |
| | 1141 KGKKVIEVNK LTGIPLMYKN ADEEIKINYL KQAEDLEEVQ IGKEILKNQL IEKDGGLYYI |
| | 1201 VAPTEIINAK QLILNESQTK LVCEIYKAMK YKNYDNLDSE KIIDLYRLLI NKMELYYPEY |
| | 1261 RKQLVKKFED RYEQLKVISI EEKCNIIKQI LATLHCNSSI GKIMYSDFKI STTIGRLNGR |
| | 1321 TISLDDISFI AESPTGMYSK KYKL |
| | (SEQ ID NO: 80) |
| EfCas9 | 1 MRLFEEGHTA EDRRLKRTAR RRISRRRNRL RYLQAFFEEA MTDLDENFFA RLQESFLVPE |
| Enterococcus | 61 DKKWHRHPIF AKLEDEVAYH ETYPTIYHLR KKLADSSEQA DLRLIYLALA HIVKYRGHFL |
| faecalis | 121 IEGKLSTENT SVKDQFQQFM VIYNQTFVNG ESRLVSAPLP ESVLIEEELT EKASRTKKSE |
| NCBI | 181 KVLQQFPQEK ANGLFGQFLK LMVGNKADFK KVFGLEEEAK ITYASESYEE DLEGILAKVG |
| Reference | 241 DEYSDVFLAA KNVYDAVELS TILADSDKKS HAKLSSSMIV RFTEHQEDLK KFKRFIRENC |
| Sequence: | 301 PDEYDNLFKN EQKDGYAGYI AHAGKVSQLK FYQYVKKIIQ DIAGAEYFLE KIAQENFLRK |
| WP_ | 361 QRTFDNGVIP HQIHLAELQA IIHRQAAYYP FLKENQEKIE QLVTFRIPYY VGPLSKGDAS |
| 016631044.1 | 421 TFAWLKRQSE EPIRPWNLQE TVDLDQSATA FIERMTNFDT YLPSEKVLPK HSLLYEKFMV |
| Wild type | 481 FNELTKISYT DDRGIKANFS GKEKEKIFDY LFKTRRKVKK KDIIQFYRNE YNTEIVTLSG |
| | 541 LEEDQFNASF STYQDLLKCG LTRAELDHPD NAEKLEDIIK ILTIFEDRQR IRTQLSTFKG |
| | 601 QFSAEVLKKL ERKHYTGWGR LSKKLINGIY DKESGKTILD YLVKDDGVSK HYNRNFMQLI |
| | 661 NDSQLSFKNA IQKAQSSEHE ETLSETVNEL AGSPAIKKGI YQSLKIVDEL VAIMGYAPKR |
| | 721 IVVEMARENQ TTSTGKRRSI QRLKIVEKAM AEIGSNLLKE QPTTNEQLRD TRLFLYYMQN |
| | 781 GKDMYTGDEL SLHRLSHYDI DHIIPQSFMK DDSLDNLVLV GSTENRGKSD DVPSKEVVKD |
| | 841 MKAYWEKLYA AGLISQRKFQ RLTKGEQGGL TLEDKAHFIQ RQLVETRQIT KNVAGILDQR |
| | 901 YNAKSKEKKV QIITLKASLT SQFRSIFGLY KVREVNDYHH GQDAYLNCVV ATTLLKVYPN |
| | 961 LAPEFVYGEY PKFQTFKENK ATAKAIIYTN LLRFFTEDEP RFTKDGEILW SNSYLKTIKK |
| | 1021 ELNYHQMNIV KKVEVQKGGF SKESIKPKGP SNKLIPVKNG LDPQKYGGFD SPVVAYTVLF |
| | 1081 THEKGKKPLI KQEILGITIM EKTRFEQNPI LFLEEKGFLR PRVLMKLPKY TLYEFPEGRR |
| | 1141 RLLASAKEAQ KGNQMVLPEH LLTLLYHAKQ CLLPNQSESL AYVEQHQPEF QEILERVVDF |
| | 1201 AEVHTLAKSK VQQIVKLFEA NQTADVKEIA ASFIQLMQFN AMGAPSTFKF FQKDIERARY |
| | 1261 TSIKEIFDAT IIYQSPTGLY ETRRKVVD |
| | (SEQ ID NO: 81) |
| Staphylo- | KRNYILGLDIGITSVGYGIIDYETRDVIDAGVRLFKEANVENNEGRRSKRGARRLKRRRRHRIQRVKKLL |
| coccus | FDYNLLTDHSELSGINPYEARVKGLSQKLSEEEFSAALLHLAKRRGVHNVNEVEEDTGNELSTKEQISRN |
| aureus cas9 | SKALEEKYVAELQLERLKKDGEVRGSINRFKTSDYVKEAKQLLKVQKAYHQLDQSFIDTYIDLLETRRTY |
| | YEGPGEGSPFGWKDIKEWYEMLMGHCTYFPEELRSVKYAYNADLYNALNDLNNLVITRDENEKLEYYEKF |
| | QIIENVFKQKKKPTLKQIAKEILVNEEDIKGYRVTSTGKPEFTNLKVYHDIKDITARKEIIENAELLDQT |
| | AKILTIYQSSEDIQEELTNLNSELTQEEIEQISNLKGYTGTHNLSLKAINLILDELWHTNDNQIAIFNRL |
| | KLVPKKVDLSQQKEIPTTLVDDFILSPVVKRSFIQSIKVINAIIKKYGLPNDIIIELAREKNSKDAQKMI |
| | NEMQKRNRQTNERIEEIIRTTGKENAKYLIEKIKLHDMQEGKCLYSLEAIPLEDLLNNPFNYEVDHIIPR |
| | SVSFDNSFNNKVLVKQEENSKKGNRTPFQYLSSSDSKISYETFKKHILNLAKGKGRISKTKKEYLLEERD |
| | INRFSVQKDFINRNLVDTRYATRGLMNLLRSYFRVNNLDVKVKSINGGFTSFLRRKWKFKKERNKGYKHH |
| | AEDALIIANADFIFKEWKKLDKAKKVMENQMFEEKQAESMPEIETEQEYKEIFITPHQIKHIKDFKDYKY |
| | SHRVDKKPNRELINDTLYSTRKDDKGNTLIVNNLNGLYDKDNDKLKKLINKSPEKLLMYHHDPQTYQKLK |
| | LIMEQYGDEKNPLYKYYEETGNYLTKYSKKDNGPVIKKIKYYGNKLNAHLDITDDYPNSRNKVVKLSLKP |
| | YRFDVYLDNGVYKFVTVKNLDVIKKENYYEVNSKCYEEAKKLKKISNQAEFIASFYNNDLIKINGELYRV |
| | IGVNNDLLNRIEVNMIDITYREYLENMNDKRPPRIIKTIASKTQSIKKYSTDILGNLYEVKSKKHPQIIK |
| | KG |
| | (SEQ ID NO: 82) |
| Geobacillus | MKYKIGLDIGITSIGWAVINLDIPRIEDLGVRIFDRAENPKTGESLALPRRLARSARRRLRRRKHRLERI |
| thermoden- | RRLFVREGILTKEELNKLFEKKHEIDVWQLRVEALDRKLNNDELARILLHLAKRRGFRSNRKSERTNKEN |
| itrificans | STMLKHIEENQSILSSYRTVAEMVVKDPKFSLHKRNKEDNYTNTVARDDLEREIKLIFAKQREYGNIVCT |
| Cas9 | EAFEHEYISIWASQRPFASKDDIEKKVGFCTFEPKEKRAPKATYTFQSFTVWEHINKLRLVSPGGIRALT |
| | DDERRLIYKQAFHKNKITFHDVRTLLNLPDDTRFKGLLYDRNTTLKENEKVRFLELGAYHKIRKAIDSVY |
| | GKGAAKSFRPIDFDTFGYALTMFKDDTDIRSYLRNEYEQNGKRMENLADKVYDEELIEELLNLSFSKFGH |
| | LSLKALRNILPYMEQGEVYSTACERAGYTFTGPKKKQKTVLLPNIPPIANPVVMRALTQARKVVNAIIKK |
| | YGSPVSIHIELARELSQSFDERRKMQKEQEGNRKKNETAIRQLVEYGLTLNPTGLDIVKFKLWSEQNGKC |
| | AYSLQPIEIERLLEPGYTEVDHVIPYSRSLDDSYTNKVLVLTKENREKGNRTPAEYLGLGSERWQQFETF |
| | VLTNKQFSKKKRDRLLRLHYDENEENEFKNRNLNDTRYISRFLANFIREHLKFADSDDKQKVYTVNGRIT |
| | AHLRSRWNFNKNREESNLHHAVDAAIVACTTPSDIARVTAFYQRREQNKELSKKTDPQFPQPWPHFADEL |
| | QARLSKNPKESIKALNLGNYDNEKLESLQPVFVSRMPKRSITGAAHQETLRRYIGIDERSGKIQTVVKKK |
| | LSEIQLDKTGHFPMYGKESDPRTYEAIRQRLLEHNNDPKKAFQEPLYKPKKNGELGPIIRTIKIIDTTNQ |
| | VIPLNDGKTVAYNSNIVRVDVFEKDGKYYCVPIYTIDMMKGILPNKAIEPNKPYSEWKEMTEDYTFRFSL |
| | YPNDLIRIEFPREKTIKTAVGEEIKIKDLFAYYQTIDSSNGGLSLVSHDNNFSLRSIGSRTLKRFEKYQV |
| | DVLGNIYKVRGEKRVGVASSSHSKAGETIRPL |
| | (SEQ ID NO: 83) |
| ScCas9 | MEKKYSIGLDIGTNSVGWAVITDDYKVPSKKFKVLGNTNRKSIKKNLMGALLFDSGETAEATRLKRTARR |
| S. canis | RYTRRKNRIRYLQEIFANEMAKLDDSFFQRLEESFLVEEDKKNERHPIFGNLADEVAYHRNYPTIYHLRK |
| 1375 AA | KLADSPEKADLRLIYLALAHIIKFRGHFLIEGKLNAENSDVAKLFYQLIQTYNQLFEESPLDEIEVDAKG |
| 159.2 kDa | ILSARLSKSKRLEKLIAVFPNEKKNGLFGNIIALALGLTPNFKSNFDLTEDAKLQLSKDTYDDDLDELLG |
| | QIGDQYADLFSAAKNLSDAILLSDILRSNSEVTKAPLSASMVKRYDEHHQDLALLKTLVRQQFPEKYAEI |
| | FKDDTKNGYAGYVGIGIKHRKRTTKLATQEEFYKFIKPILEKMDGAEELLAKLNRDDLLRKQRTFDNGSI |
| | PHQIHLKELHAILRRQEEFYPFLKENREKIEKILTFRIPYYVGPLARGNSRFAWLTRKSEEATTPWNFEE |
| | VVDKGASAQSFIERMTNFDEQLPNKKVLPKHSLLYEYFTVYNELTKVKYVTERMRKPEFLSGEQKKAIVD |
| | LLFKTNRKVTVKQLKEDYFKKIECFDSVEIIGVEDRFNASLGTYHDLLKIIKDKDFLDNEENEDILEDIV |
| | LTLTLFEDREMIEERLKTYAHLFDDKVMKQLKRRHYTGWGRLSRKMINGIRDKQSGKTILDFLKSDGFSN |
| | RNFMQLIHDDSLTFKEEIEKAQVSGQGDSLHEQIADLAGSPAIKKGILQTVKIVDELVKVMGHKPENIVI |
| | EMARENQTTTKGLQQSRERKKRIEEGIKELESQILKENPVENTQLQNEKLYLYYLQNGRDMYVDQELDIN |
| | RLSDYDVDHIVPQSFIKDDSIDNKVLTRSVENRGKSDNVPSEEVVKKMKNYWRQLLNAKLITQRKFDNLT |
| | KAERGGLSEADKAGFIKRQLVETRQITKHVARILDSRMNTKRDKNDKPIREVKVITLKSKLVSDFRKDFQ |
| | LYKVRDINNYHHAHDAYLNAVVGTALIKKYPKLESEFVYGDYKVYDVRKMIAKSEQEIGKATAKRFFYSN |
| | IMNFFKTEVKLANGEIRKRPLIETNGETGEVVWNKEKDFATVRKVLAMPQVNIVKKTEVQTGGFSKESIL |
| | SKRESAKLIPRKKGWDTRKYGGFGSPTVAYSILVVAKVEKGKAKKLKSVKVLVGITIMEKGSYEKDPIGF |
| | LEAKGYKDIKKELIFKLPKYSLFELENGRRRMLASATELQKANELVLPQHLVRLLYYTQNISATTGSNNL |
| | GYIEQHREEFKEIFEKIIDFSEKYILKNKVNSNLKSSFDEQFAVSDSILLSNSFVSLLKYTSFGASGGFT |
| | FLDLDVKQGRLRYQTVTEVLDATLIYQSITGLYETRTDLSQLGGD |
| | (SEQ ID NO: 84) |

[0129] The base editors described herein may include any of the above Cas9 ortholog sequences, or any variants thereof having at least 80%, at least 85%, at least 90%, at least 95%, or at least 99% sequence identity thereto.

[0130] The napDNAbp may include any suitable homologs and/or orthologs or naturally occurring enzymes, such as Cas9. Cas9 homologs and/or orthologs have been described in various species, including, but not limited to, S. pyogenes and S. thermophilus. Preferably, the Cas moiety is configured (e.g., mutagenized, recombinantly engineered, or otherwise obtained from nature) as a nickase, i.e., capable of cleaving only a single strand of the target doubpdditional suitable Cas9 nucleases and sequences will be apparent to those of skill in the art based on this disclosure, and such Cas9 nucleases and sequences include Cas9 sequences from the organisms and loci disclosed in Chylinski, Rhun, and Charpentier, “The tracrRNA and Cas9 families of type II CRISPR-Cas immunity systems” (2013) RNA Biology 10:5, 726-737; the entire contents of which are incorporated herein by reference. In some embodiments, a Cas9 nuclease has an inactive (e.g., an inactivated) DNA cleavage domain, that is, the Cas9 is a nickase. In some embodiments, the Cas9 protein comprises an amino acid sequence that is at least 80% identical to the amino acid sequence of a Cas9 protein as provided by any one of the variants of Table 3. In some embodiments, the Cas9 protein comprises an amino acid sequence that is at least 85%, at least 90%, at least 92%, at least 95%, at least 96%, at least 97%, at least 98%, at least 99%, or at least 99.5% identical to the amino acid sequence of a Cas9 protein as provided by any one of the Cas9 orthologs in the above tables.

[0131] Dead napDNAbp Variants

[0132] In some embodiments, the disclosed base editors may comprise a catalytically inactive, or “dead,” napDNAbp domain. Exemplary catalytically inactive domains in the disclosed base editors are dead S. pyogenes Cas9 (dSpCas9) and S. pyogenes Cas9 nickase (SpCas9n).

[0133] In certain embodiments, the base editors described herein may include a dead Cas9, e.g., dead SpCas9, which has no nuclease activity due to one or more mutations that inactivate both nuclease domains of SpCas9, namely the RuvC domain (which cleaves the non-protospacer DNA strand) and HNH domain (which cleaves the protospacer DNA strand). The nuclease inactivation may be due to one or mutations that result in one or more substitutions and/or deletions in the amino acid sequence of the encoded protein, or any variants thereof having at least 80%, at least 85%, at least 90%, at least 95%, or at least 99% sequence identity thereto.

[0134] In certain embodiments, the base editors described herein may include a dead Cas9, e.g., dead SpCas9, which has no nuclease activity due to one or more mutations that inactivate both nuclease domains of SpCas9, namely the RuvC domain (which cleaves the non-protospacer DNA strand) and HNH domain (which cleaves the protospacer DNA strand). The D10A and N580A mutations in the wild-type S. aureus Cas9 amino acid sequence may be used to form a dSaCas9. Accordingly, in some embodiments, the napDNAbp domain of the base editors provided herein comprises a dSaCas9 that has D10A and N580A mutations relative to the wild-type SaCas9 sequence (SEQ ID NO: 72).

[0135] As used herein, the term “dCas9” refers to a nuclease-inactive Cas9 or nuclease-dead Cas9, or a functional fragment thereof, and embraces any naturally occurring dCas9 from any organism, any naturally-occurring dCas9 equivalent or functional fragment thereof, any dCas9 homolog, ortholog, or paralog from any organism, and any mutant or variant of a dCas9, naturally-occurring or engineered. The term dCas9 is not meant to be particularly limiting and may be referred to as a “dCas9 or equivalent.” Exemplary dCas9 proteins and method for making dCas9 proteins are further described herein and/or are described in the art and are incorporated herein by reference.

[0136] In other embodiments, dCas9 corresponds to, or comprises in part or in whole, a Cas9 amino acid sequence having one or more mutations that inactivate the Cas9 nuclease activity. In other embodiments, Cas9 variants having mutations other than D10A and H840A are provided which may result in the full or partial inactivate of the endogenous Cas9 nuclease activity (e.g., nCas9 or dCas9, respectively). Such mutations, by way of example, include other amino acid substitutions at D10 and H820, or other substitutions within the nuclease domains of Cas9 (e.g., substitutions in the HNH nuclease subdomain and/or the RuvC1 subdomain) with reference to a wild type sequence such as Cas9 from Streptococcus pyogenes (NCBI Reference Sequence: NC_017053.1). In some embodiments, variants or homologues of Cas9 (e.g., variants of Cas9 from Streptococcus pyogenes (NCBI Reference Sequence: NC_017053.1)) are provided which are at least about 70% identical, at least about 80% identical, at least about 90% identical, at least about 95% identical, at least about 98% identical, at least about 99% identical, at least about 99.5% identical, or at least about 99.9% identical to NCBI Reference Sequence: NC_017053.1. In some embodiments, variants of dCas9 (e.g., variants of NCBI Reference Sequence: NC_017053.1) are provided having amino acid sequences which are shorter, or longer than NC_017053.1 by about 5 amino acids, by about 10 amino acids, by about 15 amino acids, by about 20 amino acids, by about 25 amino acids, by about 30 amino acids, by about 40 amino acids, by about 50 amino acids, by about 75 amino acids, by about 100 amino acids or more.

[0137] In some embodiments, the napDNAbp domain of any of the disclosed base editors comprises a dead S. pyogenes Cas9 (dSpCas9). In some embodiments, the napDNAbp domain of any of the disclosed based editors is comprises at least 80%, at least 85%, at least 90%, at least 95%, or at least 99% sequence identity to SEQ ID NO: 86. In some embodiments, the napDNAbp domain of any of the disclosed base editors comprises the amino acid sequence of SEQ ID NO: 86.

[0138] In one embodiment, the dead Cas9 may be based on the canonical SpCas9 sequence of Q99ZW2 and may have the following sequence, which comprises a D10A and an H810A substitutions (underlined and bolded), or a variant of SEQ ID NO: 86 having at least 80%, at least 85%, at least 90%, at least 95%, or at least 99% sequence identity thereto:

| | | SEQ ID |
|---|---|---|
| Description | Sequence | NO: |
| dead Cas9 or | MDKKYSIGLXIGTNSVGWAVITDEYKVPSKKFKVLGNTDRHSIKKNLIGALLFDSGE | SEQ ID |
| dCas9 | TAEATRLKRTARRRYTRRKNRICYLQEIFSNEMAKVDDSFFHRLEESFLVEEDKKHE | NO: 85 |
| Streptococcus | RHPIFGNIVDEVAYHEKYPTIYHLRKKLVDSTDKADLRLIYLALAHMIKFRGHFLIE | |
| pyogenes | GDLNPDNSDVDKLFIQLVQTYNQLFEENPINASGVDAKAILSARLSKSRRLENLIAQ | |
| Q99ZW2 Cas9 | LPGEKKNGLFGNLIALSLGLTPNFKSNFDLAEDAKLQLSKDTYDDDLDNLLAQIGDQ | |
| with D10X | YADLFLAAKNLSDAILLSDILRVNTEITKAPLSASMIKRYDEHHQDLTLLKALVRQQ | |
| and H810X | LPEKYKEIFFDQSKNGYAGYIDGGASQEEFYKFIKPILEKMDGTEELLVKLNREDLL | |
| Where “X” is | RKQRTFDNGSIPHQIHLGELHAILRRQEDFYPFLKDNREKIEKILTFRIPYYVGPLA | |
| any amino | RGNSRFAWMTRKSEETITPWNFEEVVDKGASAQSFIERMTNFDKNLPNEKVLPKHSL | |
| acid | LYEYFTVYNELTKVKYVTEGMRKPAFLSGEQKKAIVDLLFKTNRKVTVKQLKEDYFK | |
| | KIECFDSVEISGVEDRFNASLGTYHDLLKIIKDKDFLDNEENEDILEDIVLTLTLFE | |
| | DREMIEERLKTYAHLFDDKVMKQLKRRRYTGWGRLSRKLINGIRDKQSGKTILDFLK | |
| | SDGFANRNFMQLIHDDSLTFKEDIQKAQVSGQGDSLHEHIANLAGSPAIKKGILQTV | |
| | KVVDELVKVMGRHKPENIVIEMARENQTTQKGQKNSRERMKRIEEGIKELGSQILKE | |
| | HPVENTQLQNEKLYLYYLQNGRDMYVDQELDINRLSDYDVDXIVPQSFLKDDSIDNK | |
| | VLTRSDKNRGKSDNVPSEEVVKKMKNYWRQLLNAKLITQRKFDNLTKAERGGLSELD | |
| | KAGFIKRQLVETRQITKHVAQILDSRMNTKYDENDKLIREVKVITLKSKLVSDFRKD | |
| | FQFYKVREINNYHHAHDAYLNAVVGTALIKKYPKLESEFVYGDYKVYDVRKMIAKSE | |
| | QEIGKATAKYFFYSNIMNFFKTEITLANGEIRKRPLIETNGETGEIVWDKGRDFATV | |
| | RKVLSMPQVNIVKKTEVQTGGFSKESILPKRNSDKLIARKKDWDPKKYGGFDSPTVA | |
| | YSVLVVAKVEKGKSKKLKSVKELLGITIMERSSFEKNPIDFLEAKGYKEVKKDLIIK | |
| | LPKYSLFELENGRKRMLASAGELQKGNELALPSKYVNFLYLASHYEKLKGSPEDNEQ | |
| | KQLFVEQHKHYLDEIIEQISEFSKRVILADANLDKVLSAYNKHRDKPIREQAENIIH | |
| | LFTLTNLGAPAAFKYFDTTIDRKRYTSTKEVLDATLIHQSITGLYETRIDLSQLGGD | |
| dead Cas9 or | MDKKYSIGLAIGTNSVGWAVITDEYKVPSKKFKVLGNTDRHSIKKNLIGALLFDSGE | SEQ ID |
| dCas9 | TAEATRLKRTARRRYTRRKNRICYLQEIFSNEMAKVDDSFFHRLEESFLVEEDKKHE | NO: 86 |
| Streptococcus | RHPIFGNIVDEVAYHEKYPTIYHLRKKLVDSTDKADLRLIYLALAHMIKFRGHFLIE | |
| pyogenes | GDLNPDNSDVDKLFIQLVQTYNQLFEENPINASGVDAKAILSARLSKSRRLENLIAQ | |
| Q99ZW2 Cas9 | LPGEKKNGLFGNLIALSLGLTPNFKSNFDLAEDAKLQLSKDTYDDDLDNLLAQIGDQ | |
| with D10A | YADLFLAAKNLSDAILLSDILRVNTEITKAPLSASMIKRYDEHHQDLTLLKALVRQQ | |
| and H810A | LPEKYKEIFFDQSKNGYAGYIDGGASQEEFYKFIKPILEKMDGTEELLVKLNREDLL | |
| | RKQRTFDNGSIPHQIHLGELHAILRRQEDFYPFLKDNREKIEKILTFRIPYYVGPLA | |
| | RGNSRFAWMTRKSEETITPWNFEEVVDKGASAQSFIERMTNFDKNLPNEKVLPKHSL | |
| | LYEYFTVYNELTKVKYVTEGMRKPAFLSGEQKKAIVDLLFKTNRKVTVKQLKEDYFK | |
| | KIECFDSVEISGVEDRFNASLGTYHDLLKIIKDKDFLDNEENEDILEDIVLTLTLFE | |
| | DREMIEERLKTYAHLFDDKVMKQLKRRRYTGWGRLSRKLINGIRDKQSGKTILDFLK | |
| | SDGFANRNFMQLIHDDSLTFKEDIQKAQVSGQGDSLHEHIANLAGSPAIKKGILQTV | |
| | KVVDELVKVMGRHKPENIVIEMARENQTTQKGQKNSRERMKRIEEGIKELGSQILKE | |
| | HPVENTQLQNEKLYLYYLQNGRDMYVDQELDINRLSDYDVDAIVPQSFLKDDSIDNK | |
| | VLTRSDKNRGKSDNVPSEEVVKKMKNYWRQLLNAKLITQRKFDNLTKAERGGLSELD | |
| | KAGFIKRQLVETRQITKHVAQILDSRMNTKYDENDKLIREVKVITLKSKLVSDFRKD | |
| | FQFYKVREINNYHHAHDAYLNAVVGTALIKKYPKLESEFVYGDYKVYDVRKMIAKSE | |
| | QEIGKATAKYFFYSNIMNFFKTEITLANGEIRKRPLIETNGETGEIVWDKGRDFATV | |
| | RKVLSMPQVNIVKKTEVQTGGFSKESILPKRNSDKLIARKKDWDPKKYGGFDSPTVA | |
| | YSVLVVAKVEKGKSKKLKSVKELLGITIMERSSFEKNPIDFLEAKGYKEVKKDLIIK | |
| | LPKYSLFELENGRKRMLASAGELQKGNELALPSKYVNFLYLASHYEKLKGSPEDNEQ | |
| | KQLFVEQHKHYLDEIIEQISEFSKRVILADANLDKVLSAYNKHRDKPIREQAENIIH | |
| | LFTLTNLGAPAAFKYFDTTIDRKRYTSTKEVLDATLIHQSITGLYETRIDLSQLGGD | |
| dead | MSKLEKFTNCYSLSKTLRFKAIPVGKTQENIDNKRLLVEDEKRAEDYKGVKKLLDRY | SEQ ID |
| Lachnospiraceae | YLSFINDVLHSIKLKNLNNYISLFRKKTRTEKENKELENLEINLRKEIAKAFKGNEG | NO: 87 |
| bacterium | YKSLFKKDIIETILPEFLDDKDEIALVNSFNGFTTAFTGFFDNRENMFSEEAKSTSI | |
| Cas12a | AFRCINENLTRYISNMDIFEKVDAIFDKHEVQEIKEKILNSDYDVEDFFEGEFFNFV | |
| | LTQEGIDVYNAIIGGFVTESGEKIKGLNEYINLYNQKTKQKLPKFKPLYKQVLSDRE | |
| | SLSFYGEGYTSDEEVLEVFRNTLNKNSEIFSSIKKLEKLFKNFDEYSSAGIFVKNGP | |
| | AISTISKDIFGEWNVIRDKWNAEYDDIHLKKKAVVTEKYEDDRRKSFKKIGSFSLEQ | |
| | LQEYADADLSVVEKLKEIIIQKVDEIYKVYGSSEKLFDADFVLEKSLKKNDAVVAIM | |
| | KDLLDSVKSFENYIKAFFGEGKETNRDESFYGDFVLAYDILLKVDHIYDAIRNYVTQ | |
| | KPYSKDKFKLYFQNPQFMGGWDKDKETDYRATILRYGSKYYLAIMDKKYAKCLQKID | |
| | KDDVNGNYEKINYKLLPGPNKMLPKVFFSKKWMAYYNPSEDIQKIYKNGTFKKGDMF | |
| | NLNDCHKLIDFFKDSISRYPKWSNAYDFNFSETEKYKDIAGFYREVEEQGYKVSFES | |
| | ASKKEVDKLVEEGKLYMFQIYNKDFSDKSHGTPNLHTMYFKLLFDENNHGQIRLSGG | |
| | AELFMRRASLKKEELVVHPANSPIANKNPDNPKKTTTLSYDVYKDKRFSEDQYELHI | |
| | PIAINKCPKNIFKINTEVRVLLKHDDNPYVIGIARGERNLLYIVVVDGKGNIVEQYS | |
| | LNEIINNFNGIRIKTDYHSLLDKKEKERFEARQNWTSIENIKELKAGYISQVVHKIC | |
| | ELVEKYDAVIALEDLNSGFKNSRVKVEKQVYQKFEKMLIDKLNYMVDKKSNPCATGG | |
| | ALKGYQITNKFESFKSMSTQNGFIFYIPAWLTSKIDPSTGFVNLLKTKYTSIADSKK | |
| | FISSFDRIMYVPEEDLFEFALDYKNFSRTDADYIKKWKLYSYGNRIRIFRNPKKNNV | |
| | FDWEEVCLTSAYKELFNKYGINYQQGDIRALLCEQSDKAFYSSFMALMSLMLQMRNS | |
| | ITGRTDVDFLISPVKNSDGIFYDSRNYEAQENAILPKNADANGAYNIARKVLWAIGQ | |
| | FKKAEDEKLDKVKIAISNKEWLEYAQTSVK | |

[0139] napDNAbp Nickase Variants

[0140] In some embodiments, the disclosed base editors may comprise a napDNAbp domain that comprises a nickase. In some embodiments, the base editors described herein comprise a Cas9 nickase. The term “Cas9 nickase” of “nCas9” refers to a variant of Cas9 which is capable of introducing a single-strand break in a double strand DNA molecule target. In some embodiments, the Cas9 nickase comprises only a single functioning nuclease domain. The wild type Cas9 (e.g., the canonical SpCas9) comprises two separate nuclease domains, namely, the RuvC domain (which cleaves the non-protospacer DNA strand) and HNH domain (which cleaves the protospacer DNA strand). In one embodiment, the Cas9 nickase comprises a mutation in the RuvC domain which inactivates the RuvC nuclease activity. For example, mutations in aspartate (D) 10, histidine (H) 983, aspartate (D) 986, or glutamate (E) 762, have been reported as loss-of-function mutations of the RuvC nuclease domain and the creation of a functional Cas9 nickase (e.g., Nishimasu et al., “Crystal structure of Cas9 in complex with guide RNA and target DNA,” Cell 156(5), 935-949, which is incorporated herein by reference). Thus, nickase mutations in the RuvC domain could include D10X, H983X, D986X, or E762X, wherein X is any amino acid other than the wild type amino acid. In certain embodiments, the nickase could be D10A, of H983A, or D986A, or E762A, or a combination thereof.

[0141] In some embodiments, the napDNAbp domain of any of the disclosed base editors comprises an S. pyogenes Cas9 nickase (SpCas9n). In some embodiments, the napDNAbp domain of any of the disclosed based editors is comprises at least 80%, at least 85%, at least 90%, at least 95%, or at least 99% sequence identity to SEQ ID NO: 92 or 98. In some embodiments, the napDNAbp domain of any of the disclosed base editors comprises the amino acid sequence of SEQ ID NO: 92. In some embodiments, the napDNAbp domain of any of the disclosed base editors comprises the amino acid sequence of SEQ ID NO: 98.

[0142] In some embodiments, the napDNAbp domain of any of the disclosed base editors comprises an S. aureus Cas9 nickase (SaCas9n). In some embodiments, the napDNAbp domain of any of the disclosed based editors is comprises at least 80%, at least 85%, at least 90%, at least 95%, or at least 99% sequence identity to SEQ ID NO: 96. In some embodiments, the napDNAbp domain of any of the disclosed base editors comprises the amino acid sequence of SEQ ID NO: 96.

[0143] In various embodiments, the Cas9 nickase can having a mutation in the RuvC nuclease domain and have one of the following amino acid sequences, or a variant thereof having an amino acid sequence that has at least 80%, at least 85%, at least 90%, at least 95%, or at least 99% sequence identity thereto.

| | | SEQ ID |
|---|---|---|
| Description | Sequence | NO: |
| Cas9 nickase | MDKKYSIGLXIGTNSVGWAVITDEYKVPSKKFKVLGNTDRHSIKKNLIGALLFDSGE | SEQ ID |
| Streptococcus | TAEATRLKRTARRRYTRRKNRICYLQEIFSNEMAKVDDSFFHRLEESFLVEEDKKHE | NO: 88 |
| pyogenes | RHPIFGNIVDEVAYHEKYPTIYHLRKKLVDSTDKADLRLIYLALAHMIKFRGHFLIE | |
| Q99ZW2 Cas9 | GDLNPDNSDVDKLFIQLVQTYNQLFEENPINASGVDAKAILSARLSKSRRLENLIAQ | |
| with D10X, | LPGEKKNGLFGNLIALSLGLTPNFKSNFDLAEDAKLQLSKDTYDDDLDNLLAQIGDQ | |
| wherein X is | YADLFLAAKNLSDAILLSDILRVNTEITKAPLSASMIKRYDEHHQDLTLLKALVRQQ | |
| any | LPEKYKEIFFDQSKNGYAGYIDGGASQEEFYKFIKPILEKMDGTEELLVKLNREDLL | |
| alternate | RKQRTFDNGSIPHQIHLGELHAILRRQEDFYPFLKDNREKIEKILTFRIPYYVGPLA | |
| amino acid | RGNSRFAWMTRKSEETITPWNFEEVVDKGASAQSFIERMTNFDKNLPNEKVLPKHSL | |
| | LYEYFTVYNELTKVKYVTEGMRKPAFLSGEQKKAIVDLLFKTNRKVTVKQLKEDYFK | |
| | KIECFDSVEISGVEDRFNASLGTYHDLLKIIKDKDFLDNEENEDILEDIVLTLTLFE | |
| | DREMIEERLKTYAHLFDDKVMKQLKRRRYTGWGRLSRKLINGIRDKQSGKTILDFLK | |
| | SDGFANRNFMQLIHDDSLTFKEDIQKAQVSGQGDSLHEHIANLAGSPAIKKGILQTV | |
| | KVVDELVKVMGRHKPENIVIEMARENQTTQKGQKNSRERMKRIEEGIKELGSQILKE | |
| | HPVENTQLQNEKLYLYYLQNGRDMYVDQELDINRLSDYDVDHIVPQSFLKDDSIDNK | |
| | VLTRSDKNRGKSDNVPSEEVVKKMKNYWRQLLNAKLITQRKFDNLTKAERGGLSELD | |
| | KAGFIKRQLVETRQITKHVAQILDSRMNTKYDENDKLIREVKVITLKSKLVSDFRKD | |
| | FQFYKVREINNYHHAHDAYLNAVVGTALIKKYPKLESEFVYGDYKVYDVRKMIAKSE | |
| | QEIGKATAKYFFYSNIMNFFKTEITLANGEIRKRPLIETNGETGEIVWDKGRDFATV | |
| | RKVLSMPQVNIVKKTEVQTGGFSKESILPKRNSDKLIARKKDWDPKKYGGFDSPTVA | |
| | YSVLVVAKVEKGKSKKLKSVKELLGITIMERSSFEKNPIDFLEAKGYKEVKKDLIIK | |
| | LPKYSLFELENGRKRMLASAGELQKGNELALPSKYVNFLYLASHYEKLKGSPEDNEQ | |
| | KQLFVEQHKHYLDEIIEQISEFSKRVILADANLDKVLSAYNKHRDKPIREQAENIIH | |
| | LFTLTNLGAPAAFKYFDTTIDRKRYTSTKEVLDATLIHQSITGLYETRIDLSQLGGD | |
| Cas9 nickase | MDKKYSIGLDIGTNSVGWAVITDEYKVPSKKFKVLGNTDRHSIKKNLIGALLFDSGE | SEQ ID |
| Streptococcus | TAEATRLKRTARRRYTRRKNRICYLQEIFSNEMAKVDDSFFHRLEESFLVEEDKKHE | NO: 89 |
| pyogenes | RHPIFGNIVDEVAYHEKYPTIYHLRKKLVDSTDKADLRLIYLALAHMIKFRGHFLIE | |
| Q99ZW2 Cas9 | GDLNPDNSDVDKLFIQLVQTYNQLFEENPINASGVDAKAILSARLSKSRRLENLIAQ | |
| with E762X, | LPGEKKNGLFGNLIALSLGLTPNFKSNFDLAEDAKLQLSKDTYDDDLDNLLAQIGDQ | |
| wherein X is | YADLFLAAKNLSDAILLSDILRVNTEITKAPLSASMIKRYDEHHQDLTLLKALVRQQ | |
| any | LPEKYKEIFFDQSKNGYAGYIDGGASQEEFYKFIKPILEKMDGTEELLVKLNREDLL | |
| alternate | RKQRTFDNGSIPHQIHLGELHAILRRQEDFYPFLKDNREKIEKILTFRIPYYVGPLA | |
| amino acid | RGNSRFAWMTRKSEETITPWNFEEVVDKGASAQSFIERMTNFDKNLPNEKVLPKHSL | |
| | LYEYFTVYNELTKVKYVTEGMRKPAFLSGEQKKAIVDLLFKTNRKVTVKQLKEDYFK | |
| | KIECFDSVEISGVEDRFNASLGTYHDLLKIIKDKDFLDNEENEDILEDIVLTLTLFE | |
| | DREMIEERLKTYAHLFDDKVMKQLKRRRYTGWGRLSRKLINGIRDKQSGKTILDFLK | |
| | SDGFANRNFMQLIHDDSLTFKEDIQKAQVSGQGDSLHEHIANLAGSPAIKKGILQTV | |
| | KVVDELVKVMGRHKPENIVIXMARENQTTQKGQKNSRERMKRIEEGIKELGSQILKE | |
| | HPVENTQLQNEKLYLYYLQNGRDMYVDQELDINRLSDYDVDHIVPQSFLKDDSIDNK | |
| | VLTRSDKNRGKSDNVPSEEVVKKMKNYWRQLLNAKLITQRKFDNLTKAERGGLSELD | |
| | KAGFIKRQLVETRQITKHVAQILDSRMNTKYDENDKLIREVKVITLKSKLVSDFRKD | |
| | FQFYKVREINNYHHAHDAYLNAVVGTALIKKYPKLESEFVYGDYKVYDVRKMIAKSE | |
| | QEIGKATAKYFFYSNIMNFFKTEITLANGEIRKRPLIETNGETGEIVWDKGRDFATV | |
| | RKVLSMPQVNIVKKTEVQTGGFSKESILPKRNSDKLIARKKDWDPKKYGGFDSPTVA | |
| | YSVLVVAKVEKGKSKKLKSVKELLGITIMERSSFEKNPIDFLEAKGYKEVKKDLIIK | |
| | LPKYSLFELENGRKRMLASAGELQKGNELALPSKYVNFLYLASHYEKLKGSPEDNEQ | |
| | KQLFVEQHKHYLDEIIEQISEFSKRVILADANLDKVLSAYNKHRDKPIREQAENIIH | |
| | LFTLTNLGAPAAFKYFDTTIDRKRYTSTKEVLDATLIHQSITGLYETRIDLSQLGGD | |
| Cas9 nickase | MDKKYSIGLDIGTNSVGWAVITDEYKVPSKKFKVLGNTDRHSIKKNLIGALLFDSGE | SEQ ID |
| Streptococcus | TAEATRLKRTARRRYTRRKNRICYLQEIFSNEMAKVDDSFFHRLEESFLVEEDKKHE | NO: 90 |
| pyogenes | RHPIFGNIVDEVAYHEKYPTIYHLRKKLVDSTDKADLRLIYLALAHMIKFRGHFLIE | |
| Q99ZW2 Cas9 | GDLNPDNSDVDKLFIQLVQTYNQLFEENPINASGVDAKAILSARLSKSRRLENLIAQ | |
| with H983X, | LPGEKKNGLFGNLIALSLGLTPNFKSNFDLAEDAKLQLSKDTYDDDLDNLLAQIGDQ | |
| wherein X is | YADLFLAAKNLSDAILLSDILRVNTEITKAPLSASMIKRYDEHHQDLTLLKALVRQQ | |
| any | LPEKYKEIFFDQSKNGYAGYIDGGASQEEFYKFIKPILEKMDGTEELLVKLNREDLL | |
| alternate | RKQRTFDNGSIPHQIHLGELHAILRRQEDFYPFLKDNREKIEKILTFRIPYYVGPLA | |
| amino acid | RGNSRFAWMTRKSEETITPWNFEEVVDKGASAQSFIERMTNFDKNLPNEKVLPKHSL | |
| | LYEYFTVYNELTKVKYVTEGMRKPAFLSGEQKKAIVDLLFKTNRKVTVKQLKEDYFK | |
| | KIECFDSVEISGVEDRFNASLGTYHDLLKIIKDKDFLDNEENEDILEDIVLTLTLFE | |
| | DREMIEERLKTYAHLFDDKVMKQLKRRRYTGWGRLSRKLINGIRDKQSGKTILDFLK | |
| | SDGFANRNFMQLIHDDSLTFKEDIQKAQVSGQGDSLHEHIANLAGSPAIKKGILQTV | |
| | KVVDELVKVMGRHKPENIVIEMARENQTTQKGQKNSRERMKRIEEGIKELGSQILKE | |
| | HPVENTQLQNEKLYLYYLQNGRDMYVDQELDINRLSDYDVDHIVPQSFLKDDSIDNK | |
| | VLTRSDKNRGKSDNVPSEEVVKKMKNYWRQLLNAKLITQRKFDNLTKAERGGLSELD | |
| | KAGFIKRQLVETRQITKHVAQILDSRMNTKYDENDKLIREVKVITLKSKLVSDFRKD | |
| | FQFYKVREINNYHXAHDAYLNAVVGTALIKKYPKLESEFVYGDYKVYDVRKMIAKSE | |
| | QEIGKATAKYFFYSNIMNFFKTEITLANGEIRKRPLIETNGETGEIVWDKGRDFATV | |
| | RKVLSMPQVNIVKKTEVQTGGFSKESILPKRNSDKLIARKKDWDPKKYGGFDSPTVA | |
| | YSVLVVAKVEKGKSKKLKSVKELLGITIMERSSFEKNPIDFLEAKGYKEVKKDLIIK | |
| | LPKYSLFELENGRKRMLASAGELQKGNELALPSKYVNFLYLASHYEKLKGSPEDNEQ | |
| | KQLFVEQHKHYLDEIIEQISEFSKRVILADANLDKVLSAYNKHRDKPIREQAENIIH | |
| | LFTLTNLGAPAAFKYFDTTIDRKRYTSTKEVLDATLIHQSITGLYETRIDLSQLGGD | |
| Cas9 nickase | MDKKYSIGLDIGTNSVGWAVITDEYKVPSKKFKVLGNTDRHSIKKNLIGALLFDSGE | SEQ ID |
| Streptococcus | TAEATRLKRTARRRYTRRKNRICYLQEIFSNEMAKVDDSFFHRLEESFLVEEDKKHE | NO: 91 |
| pyogenes | RHPIFGNIVDEVAYHEKYPTIYHLRKKLVDSTDKADLRLIYLALAHMIKFRGHFLIE | |
| Q99ZW2 Cas9 | GDLNPDNSDVDKLFIQLVQTYNQLFEENPINASGVDAKAILSARLSKSRRLENLIAQ | |
| with D986X, | LPGEKKNGLFGNLIALSLGLTPNFKSNFDLAEDAKLQLSKDTYDDDLDNLLAQIGDQ | |
| wherein X is | YADLFLAAKNLSDAILLSDILRVNTEITKAPLSASMIKRYDEHHQDLTLLKALVRQQ | |
| any | LPEKYKEIFFDQSKNGYAGYIDGGASQEEFYKFIKPILEKMDGTEELLVKLNREDLL | |
| alternate | RKQRTFDNGSIPHQIHLGELHAILRRQEDFYPFLKDNREKIEKILTFRIPYYVGPLA | |
| amino acid | RGNSRFAWMTRKSEETITPWNFEEVVDKGASAQSFIERMTNFDKNLPNEKVLPKHSL | |
| | LYEYFTVYNELTKVKYVTEGMRKPAFLSGEQKKAIVDLLFKTNRKVTVKQLKEDYFK | |
| | KIECFDSVEISGVEDRFNASLGTYHDLLKIIKDKDFLDNEENEDILEDIVLTLTLFE | |
| | DREMIEERLKTYAHLFDDKVMKQLKRRRYTGWGRLSRKLINGIRDKQSGKTILDFLK | |
| | SDGFANRNFMQLIHDDSLTFKEDIQKAQVSGQGDSLHEHIANLAGSPAIKKGILQTV | |
| | KVVDELVKVMGRHKPENIVIEMARENQTTQKGQKNSRERMKRIEEGIKELGSQILKE | |
| | HPVENTQLQNEKLYLYYLQNGRDMYVDQELDINRLSDYDVDHIVPQSFLKDDSIDNK | |
| | VLTRSDKNRGKSDNVPSEEVVKKMKNYWRQLLNAKLITQRKFDNLTKAERGGLSELD | |
| | KAGFIKRQLVETRQITKHVAQILDSRMNTKYDENDKLIREVKVITLKSKLVSDFRKD | |
| | FQFYKVREINNYHHAHXAYLNAVVGTALIKKYPKLESEFVYGDYKVYDVRKMIAKSE | |
| | QEIGKATAKYFFYSNIMNFFKTEITLANGEIRKRPLIETNGETGEIVWDKGRDFATV | |
| | RKVLSMPQVNIVKKTEVQTGGFSKESILPKRNSDKLIARKKDWDPKKYGGFDSPTVA | |
| | YSVLVVAKVEKGKSKKLKSVKELLGITIMERSSFEKNPIDFLEAKGYKEVKKDLIIK | |
| | LPKYSLFELENGRKRMLASAGELQKGNELALPSKYVNFLYLASHYEKLKGSPEDNEQ | |
| | KQLFVEQHKHYLDEIIEQISEFSKRVILADANLDKVLSAYNKHRDKPIREQAENIIH | |
| | LFTLTNLGAPAAFKYFDTTIDRKRYTSTKEVLDATLIHQSITGLYETRIDLSQLGGD | |
| Cas9 nickase | MDKKYSIGLAIGTNSVGWAVITDEYKVPSKKFKVLGNTDRHSIKKNLIGALLFDSGE | SEQ ID |
| Streptococcus | TAEATRLKRTARRRYTRRKNRICYLQEIFSNEMAKVDDSFFHRLEESFLVEEDKKHE | NO: 92 |
| pyogenes | RHPIFGNIVDEVAYHEKYPTIYHLRKKLVDSTDKADLRLIYLALAHMIKFRGHFLIE | |
| Q99ZW2 Cas9 | GDLNPDNSDVDKLFIQLVQTYNQLFEENPINASGVDAKAILSARLSKSRRLENLIAQ | |
| with D10A | LPGEKKNGLFGNLIALSLGLTPNFKSNFDLAEDAKLQLSKDTYDDDLDNLLAQIGDQ | |
| | YADLFLAAKNLSDAILLSDILRVNTEITKAPLSASMIKRYDEHHQDLTLLKALVRQQ | |
| | LPEKYKEIFFDQSKNGYAGYIDGGASQEEFYKFIKPILEKMDGTEELLVKLNREDLL | |
| | RKQRTFDNGSIPHQIHLGELHAILRRQEDFYPFLKDNREKIEKILTFRIPYYVGPLA | |
| | RGNSRFAWMTRKSEETITPWNFEEVVDKGASAQSFIERMTNFDKNLPNEKVLPKHSL | |
| | LYEYFTVYNELTKVKYVTEGMRKPAFLSGEQKKAIVDLLFKTNRKVTVKQLKEDYFK | |
| | KIECFDSVEISGVEDRFNASLGTYHDLLKIIKDKDFLDNEENEDILEDIVLTLTLFE | |
| | DREMIEERLKTYAHLFDDKVMKQLKRRRYTGWGRLSRKLINGIRDKQSGKTILDFLK | |
| | SDGFANRNFMQLIHDDSLTFKEDIQKAQVSGQGDSLHEHIANLAGSPAIKKGILQTV | |
| | KVVDELVKVMGRHKPENIVIEMARENQTTQKGQKNSRERMKRIEEGIKELGSQILKE | |
| | HPVENTQLQNEKLYLYYLQNGRDMYVDQELDINRLSDYDVDHIVPQSFLKDDSIDNK | |
| | VLTRSDKNRGKSDNVPSEEVVKKMKNYWRQLLNAKLITQRKFDNLTKAERGGLSELD | |
| | KAGFIKRQLVETRQITKHVAQILDSRMNTKYDENDKLIREVKVITLKSKLVSDFRKD | |
| | FQFYKVREINNYHHAHDAYLNAVVGTALIKKYPKLESEFVYGDYKVYDVRKMIAKSE | |
| | QEIGKATAKYFFYSNIMNFFKTEITLANGEIRKRPLIETNGETGEIVWDKGRDFATV | |
| | RKVLSMPQVNIVKKTEVQTGGFSKESILPKRNSDKLIARKKDWDPKKYGGFDSPTVA | |
| | YSVLVVAKVEKGKSKKLKSVKELLGITIMERSSFEKNPIDFLEAKGYKEVKKDLIIK | |
| | LPKYSLFELENGRKRMLASAGELQKGNELALPSKYVNFLYLASHYEKLKGSPEDNEQ | |
| | KQLFVEQHKHYLDEIIEQISEFSKRVILADANLDKVLSAYNKHRDKPIREQAENIIH | |
| | LFTLTNLGAPAAFKYFDTTIDRKRYTSTKEVLDATLIHQSITGLYETRIDLSQLGGD | |
| Cas9 nickase | MDKKYSIGLDIGTNSVGWAVITDEYKVPSKKFKVLGNTDRHSIKKNLIGALLFDSGE | SEQ ID |
| Streptococcus | TAEATRLKRTARRRYTRRKNRICYLQEIFSNEMAKVDDSFFHRLEESFLVEEDKKHE | NO: 93 |
| pyogenes | RHPIFGNIVDEVAYHEKYPTIYHLRKKLVDSTDKADLRLIYLALAHMIKFRGHFLIE | |
| Q99ZW2 Cas9 | GDLNPDNSDVDKLFIQLVQTYNQLFEENPINASGVDAKAILSARLSKSRRLENLIAQ | |
| with E762A | LPGEKKNGLFGNLIALSLGLTPNFKSNFDLAEDAKLQLSKDTYDDDLDNLLAQIGDQ | |
| | YADLFLAAKNLSDAILLSDILRVNTEITKAPLSASMIKRYDEHHQDLTLLKALVRQQ | |
| | LPEKYKEIFFDQSKNGYAGYIDGGASQEEFYKFIKPILEKMDGTEELLVKLNREDLL | |
| | RKQRTFDNGSIPHQIHLGELHAILRRQEDFYPFLKDNREKIEKILTFRIPYYVGPLA | |
| | RGNSRFAWMTRKSEETITPWNFEEVVDKGASAQSFIERMTNFDKNLPNEKVLPKHSL | |
| | LYEYFTVYNELTKVKYVTEGMRKPAFLSGEQKKAIVDLLFKTNRKVTVKQLKEDYFK | |
| | KIECFDSVEISGVEDRFNASLGTYHDLLKIIKDKDFLDNEENEDILEDIVLTLTLFE | |
| | DREMIEERLKTYAHLFDDKVMKQLKRRRYTGWGRLSRKLINGIRDKQSGKTILDFLK | |
| | SDGFANRNFMQLIHDDSLTFKEDIQKAQVSGQGDSLHEHIANLAGSPAIKKGILQTV | |
| | KVVDELVKVMGRHKPENIVIAMARENQTTQKGQKNSRERMKRIEEGIKELGSQILKE | |
| | HPVENTQLQNEKLYLYYLQNGRDMYVDQELDINRLSDYDVDHIVPQSFLKDDSIDNK | |
| | VLTRSDKNRGKSDNVPSEEVVKKMKNYWRQLLNAKLITQRKFDNLTKAERGGLSELD | |
| | KAGFIKRQLVETRQITKHVAQILDSRMNTKYDENDKLIREVKVITLKSKLVSDFRKD | |
| | FQFYKVREINNYHHAHDAYLNAVVGTALIKKYPKLESEFVYGDYKVYDVRKMIAKSE | |
| | QEIGKATAKYFFYSNIMNFFKTEITLANGEIRKRPLIETNGETGEIVWDKGRDFATV | |
| | RKVLSMPQVNIVKKTEVQTGGFSKESILPKRNSDKLIARKKDWDPKKYGGFDSPTVA | |
| | YSVLVVAKVEKGKSKKLKSVKELLGITIMERSSFEKNPIDFLEAKGYKEVKKDLIIK | |
| | LPKYSLFELENGRKRMLASAGELQKGNELALPSKYVNFLYLASHYEKLKGSPEDNEQ | |
| | KQLFVEQHKHYLDEIIEQISEFSKRVILADANLDKVLSAYNKHRDKPIREQAENIIH | |
| | LFTLTNLGAPAAFKYFDTTIDRKRYTSTKEVLDATLIHQSITGLYETRIDLSQLGGD | |
| Cas9 nickase | MDKKYSIGLDIGTNSVGWAVITDEYKVPSKKFKVLGNTDRHSIKKNLIGALLFDSGE | SEQ ID |
| Streptococcus | TAEATRLKRTARRRYTRRKNRICYLQEIFSNEMAKVDDSFFHRLEESFLVEEDKKHE | NO: 94 |
| pyogenes | RHPIFGNIVDEVAYHEKYPTIYHLRKKLVDSTDKADLRLIYLALAHMIKFRGHFLIE | |
| Q99ZW2 Cas9 | GDLNPDNSDVDKLFIQLVQTYNQLFEENPINASGVDAKAILSARLSKSRRLENLIAQ | |
| with H983A | LPGEKKNGLFGNLIALSLGLTPNFKSNFDLAEDAKLQLSKDTYDDDLDNLLAQIGDQ | |
| | YADLFLAAKNLSDAILLSDILRVNTEITKAPLSASMIKRYDEHHQDLTLLKALVRQQ | |
| | LPEKYKEIFFDQSKNGYAGYIDGGASQEEFYKFIKPILEKMDGTEELLVKLNREDLL | |
| | RKQRTFDNGSIPHQIHLGELHAILRRQEDFYPFLKDNREKIEKILTFRIPYYVGPLA | |
| | RGNSRFAWMTRKSEETITPWNFEEVVDKGASAQSFIERMTNFDKNLPNEKVLPKHSL | |
| | LYEYFTVYNELTKVKYVTEGMRKPAFLSGEQKKAIVDLLFKTNRKVTVKQLKEDYFK | |
| | KIECFDSVEISGVEDRFNASLGTYHDLLKIIKDKDFLDNEENEDILEDIVLTLTLFE | |
| | DREMIEERLKTYAHLFDDKVMKQLKRRRYTGWGRLSRKLINGIRDKQSGKTILDFLK | |
| | SDGFANRNFMQLIHDDSLTFKEDIQKAQVSGQGDSLHEHIANLAGSPAIKKGILQTV | |
| | KVVDELVKVMGRHKPENIVIEMARENQTTQKGQKNSRERMKRIEEGIKELGSQILKE | |
| | HPVENTQLQNEKLYLYYLQNGRDMYVDQELDINRLSDYDVDHIVPQSFLKDDSIDNK | |
| | VLTRSDKNRGKSDNVPSEEVVKKMKNYWRQLLNAKLITQRKFDNLTKAERGGLSELD | |
| | KAGFIKRQLVETRQITKHVAQILDSRMNTKYDENDKLIREVKVITLKSKLVSDFRKD | |
| | FQFYKVREINNYHAAHDAYLNAVVGTALIKKYPKLESEFVYGDYKVYDVRKMIAKSE | |
| | QEIGKATAKYFFYSNIMNFFKTEITLANGEIRKRPLIETNGETGEIVWDKGRDFATV | |
| | RKVLSMPQVNIVKKTEVQTGGFSKESILPKRNSDKLIARKKDWDPKKYGGFDSPTVA | |
| | YSVLVVAKVEKGKSKKLKSVKELLGITIMERSSFEKNPIDFLEAKGYKEVKKDLIIK | |
| | LPKYSLFELENGRKRMLASAGELQKGNELALPSKYVNFLYLASHYEKLKGSPEDNEQ | |
| | KQLFVEQHKHYLDEIIEQISEFSKRVILADANLDKVLSAYNKHRDKPIREQAENIIH | |
| | LFTLTNLGAPAAFKYFDTTIDRKRYTSTKEVLDATLIHQSITGLYETRIDLSQLGGD | |
| Cas9 nickase | MDKKYSIGLDIGTNSVGWAVITDEYKVPSKKFKVLGNTDRHSIKKNLIGALLFDSGE | SEQ ID |
| Streptococcus | TAEATRLKRTARRRYTRRKNRICYLQEIFSNEMAKVDDSFFHRLEESFLVEEDKKHE | NO: 95 |
| pyogenes | RHPIFGNIVDEVAYHEKYPTIYHLRKKLVDSTDKADLRLIYLALAHMIKFRGHFLIE | |
| Q99ZW2 Cas9 | GDLNPDNSDVDKLFIQLVQTYNQLFEENPINASGVDAKAILSARLSKSRRLENLIAQ | |
| with D986A | LPGEKKNGLFGNLIALSLGLTPNFKSNFDLAEDAKLQLSKDTYDDDLDNLLAQIGDQ | |
| | YADLFLAAKNLSDAILLSDILRVNTEITKAPLSASMIKRYDEHHQDLTLLKALVRQQ | |
| | LPEKYKEIFFDQSKNGYAGYIDGGASQEEFYKFIKPILEKMDGTEELLVKLNREDLL | |
| | RKQRTFDNGSIPHQIHLGELHAILRRQEDFYPFLKDNREKIEKILTFRIPYYVGPLA | |
| | RGNSRFAWMTRKSEETITPWNFEEVVDKGASAQSFIERMTNFDKNLPNEKVLPKHSL | |
| | LYEYFTVYNELTKVKYVTEGMRKPAFLSGEQKKAIVDLLFKTNRKVTVKQLKEDYFK | |
| | KIECFDSVEISGVEDRFNASLGTYHDLLKIIKDKDFLDNEENEDILEDIVLTLTLFE | |
| | DREMIEERLKTYAHLFDDKVMKQLKRRRYTGWGRLSRKLINGIRDKQSGKTILDFLK | |
| | SDGFANRNFMQLIHDDSLTFKEDIQKAQVSGQGDSLHEHIANLAGSPAIKKGILQTV | |
| | KVVDELVKVMGRHKPENIVIEMARENQTTQKGQKNSRERMKRIEEGIKELGSQILKE | |
| | HPVENTQLQNEKLYLYYLQNGRDMYVDQELDINRLSDYDVDHIVPQSFLKDDSIDNK | |
| | VLTRSDKNRGKSDNVPSEEVVKKMKNYWRQLLNAKLITQRKFDNLTKAERGGLSELD | |
| | KAGFIKRQLVETRQITKHVAQILDSRMNTKYDENDKLIREVKVITLKSKLVSDFRKD | |
| | FQFYKVREINNYHHAHAAYLNAVVGTALIKKYPKLESEFVYGDYKVYDVRKMIAKSE | |
| | QEIGKATAKYFFYSNIMNFFKTEITLANGEIRKRPLIETNGETGEIVWDKGRDFATV | |
| | RKVLSMPQVNIVKKTEVQTGGFSKESILPKRNSDKLIARKKDWDPKKYGGFDSPTVA | |
| | YSVLVVAKVEKGKSKKLKSVKELLGITIMERSSFEKNPIDFLEAKGYKEVKKDLIIK | |
| | LPKYSLFELENGRKRMLASAGELQKGNELALPSKYVNFLYLASHYEKLKGSPEDNEQ | |
| | KQLFVEQHKHYLDEIIEQISEFSKRVILADANLDKVLSAYNKHRDKPIREQAENIIH | |
| | LFTLTNLGAPAAFKYFDTTIDRKRYTSTKEVLDATLIHQSITGLYETRIDLSQLGGD | |
| Cas9 nickase | MGKRNYILGLAIGITSVGYGIIDYETRDVIDAGVRLFKEANVENNEGRRSKRGARRL | SEQ ID |
| Staphylococcus | KRRRRHRIQRVKKLLFDYNLLTDHSELSGINPYEARVKGLSQKLSEEEFSAALLHLA | NO: 96 |
| aureus | KRRGVHNVNEVEEDTGNELSTKEQISRNSKALEEKYVAELQLERLKKDGEVRGSINR | |
| (SaCas9) | FKTSDYVKEAKQLLKVQKAYHQLDQSFIDTYIDLLETRRTYYEGPGEGSPFGWKDIK | |
| with D10A | EWYEMLMGHCTYFPEELRSVKYAYNADLYNALNDLNNLVITRDENEKLEYYEKFQII | |
| | ENVFKQKKKPTLKQIAKEILVNEEDIKGYRVTSTGKPEFTNLKVYHDIKDITARKEI | |
| | IENAELLDQIAKILTIYQSSEDIQEELTNLNSELTQEEIEQISNLKGYTGTHNLSLK | |
| | AINLILDELWHTNDNQIAIFNRLKLVPKKVDLSQQKEIPTTLVDDFILSPVVKRSFI | |
| | QSIKVINAIIKKYGLPNDIIIELAREKNSKDAQKMINEMQKRNRQTNERIEEIIRTT | |
| | GKENAKYLIEKIKLHDMQEGKCLYSLEAIPLEDLLNNPFNYEVDHIIPRSVSFDNSF | |
| | NNKVLVKQEENSKKGNRTPFQYLSSSDSKISYETFKKHILNLAKGKGRISKTKKEYL | |
| | LEERDINRFSVQKDFINRNLVDTRYATRGLMNLLRSYFRVNNLDVKVKSINGGFTSF | |
| | LRRKWKFKKERNKGYKHHAEDALIIANADFIFKEWKKLDKAKKVMENQMFEEKQAES | |
| | MPEIETEQEYKEIFITPHQIKHIKDFKDYKYSHRVDKKPNRKLINDTLYSTRKDDKG | |
| | NTLIVNNLNGLYDKDNDKLKKLINKSPEKLLMYHHDPQTYQKLKLIMEQYGDEKNPL | |
| | YKYYEETGNYLTKYSKKDNGPVIKKIKYYGNKLNAHLDITDDYPNSRNKVVKLSLKP | |
| | YRFDVYLDNGVYKFVTVKNLDVIKKENYYEVNSKCYEEAKKLKKISNQAEFIASFYK | |
| | NDLIKINGELYRVIGVNNDLLNRIEVNMIDITYREYLENMNDKRPPHIIKTIASKTQ | |
| | SIKKYSTDILGNLYEVKSKKHPQIIKK | |

[0144] In another embodiment, the Cas9 nickase comprises a mutation in the HNH domain which inactivates the HNH nuclease activity. For example, mutations in histidine (H) 840 or asparagine (R) 863 have been reported as loss-of-function mutations of the HNH nuclease domain and the creation of a functional Cas9 nickase (e.g., Nishimasu et al., “Crystal structure of Cas9 in complex with guide RNA and target DNA,” Cell 156(5), 935-949, which is incorporated herein by reference). Thus, nickase mutations in the HNH domain could include H840X and R863X, wherein X is any amino acid other than the wild type amino acid. In certain embodiments, the nickase could be H840A or R863A or a combination thereof.

[0145] In various embodiments, the Cas9 nickase can have a mutation in the HNH nuclease domain and have one of the following amino acid sequences, or a variant thereof having an amino acid sequence that has at least 80%, at least 85%, at least 90%, at least 95%, or at least 99% sequence identity thereto.

| | | SEQ ID |
|---|---|---|
| Description | Sequence | NO: |
| Cas9 nickase | MDKKYSIGLDIGTNSVGWAVITDEYKVPSKKFKVLGNTDRHSIKKNLIGALLFDSGE | SEQ ID |
| Streptococcus | TAEATRLKRTARRRYTRRKNRICYLQEIFSNEMAKVDDSFFHRLEESFLVEEDKKHE | NO: 97 |
| pyogenes | RHPIFGNIVDEVAYHEKYPTIYHLRKKLVDSTDKADLRLIYLALAHMIKFRGHFLIE | |
| Q99ZW2 Cas9 | GDLNPDNSDVDKLFIQLVQTYNQLFEENPINASGVDAKAILSARLSKSRRLENLIAQ | |
| with H840X, | LPGEKKNGLFGNLIALSLGLTPNFKSNFDLAEDAKLQLSKDTYDDDLDNLLAQIGDQ | |
| wherein X is | YADLFLAAKNLSDAILLSDILRVNTEITKAPLSASMIKRYDEHHQDLTLLKALVRQQ | |
| any | LPEKYKEIFFDQSKNGYAGYIDGGASQEEFYKFIKPILEKMDGTEELLVKLNREDLL | |
| alternate | RKQRTFDNGSIPHQIHLGELHAILRRQEDFYPFLKDNREKIEKILTFRIPYYVGPLA | |
| amino acid | RGNSRFAWMTRKSEETITPWNFEEVVDKGASAQSFIERMTNFDKNLPNEKVLPKHSL | |
| | LYEYFTVYNELTKVKYVTEGMRKPAFLSGEQKKAIVDLLFKTNRKVTVKQLKEDYFK | |
| | KIECFDSVEISGVEDRFNASLGTYHDLLKIIKDKDFLDNEENEDILEDIVLTLTLFE | |
| | DREMIEERLKTYAHLFDDKVMKQLKRRRYTGWGRLSRKLINGIRDKQSGKTILDFLK | |
| | SDGFANRNFMQLIHDDSLTFKEDIQKAQVSGQGDSLHEHIANLAGSPAIKKGILQTV | |
| | KVVDELVKVMGRHKPENIVIEMARENQTTQKGQKNSRERMKRIEEGIKELGSQILKE | |
| | HPVENTQLQNEKLYLYYLQNGRDMYVDQELDINRLSDYDVDXIVPQSFLKDDSIDNK | |
| | VLTRSDKNRGKSDNVPSEEVVKKMKNYWRQLLNAKLITQRKFDNLTKAERGGLSELD | |
| | KAGFIKRQLVETRQITKHVAQILDSRMNTKYDENDKLIREVKVITLKSKLVSDFRKD | |
| | FQFYKVREINNYHHAHDAYLNAVVGTALIKKYPKLESEFVYGDYKVYDVRKMIAKSE | |
| | QEIGKATAKYFFYSNIMNFFKTEITLANGEIRKRPLIETNGETGEIVWDKGRDFATV | |
| | RKVLSMPQVNIVKKTEVQTGGFSKESILPKRNSDKLIARKKDWDPKKYGGFDSPTVA | |
| | YSVLVVAKVEKGKSKKLKSVKELLGITIMERSSFEKNPIDFLEAKGYKEVKKDLIIK | |
| | LPKYSLFELENGRKRMLASAGELQKGNELALPSKYVNFLYLASHYEKLKGSPEDNEQ | |
| | KQLFVEQHKHYLDEIIEQISEFSKRVILADANLDKVLSAYNKHRDKPIREQAENIIH | |
| | LFTLTNLGAPAAFKYFDTTIDRKRYTSTKEVLDATLIHQSITGLYETRIDLSQLGGD | |
| Cas9 nickase | MDKKYSIGLDIGTNSVGWAVITDEYKVPSKKFKVLGNTDRHSIKKNLIGALLFDSGE | SEQ ID |
| Streptococcus | TAEATRLKRTARRRYTRRKNRICYLQEIFSNEMAKVDDSFFHRLEESFLVEEDKKHE | NO: 98 |
| pyogenes | RHPIFGNIVDEVAYHEKYPTIYHLRKKLVDSTDKADLRLIYLALAHMIKFRGHFLIE | |
| Q99ZW2 Cas9 | GDLNPDNSDVDKLFIQLVQTYNQLFEENPINASGVDAKAILSARLSKSRRLENLIAQ | |
| with H840A | LPGEKKNGLFGNLIALSLGLTPNFKSNFDLAEDAKLQLSKDTYDDDLDNLLAQIGDQ | |
| | YADLFLAAKNLSDAILLSDILRVNTEITKAPLSASMIKRYDEHHQDLTLLKALVRQQ | |
| | LPEKYKEIFFDQSKNGYAGYIDGGASQEEFYKFIKPILEKMDGTEELLVKLNREDLL | |
| | RKQRTFDNGSIPHQIHLGELHAILRRQEDFYPFLKDNREKIEKILTFRIPYYVGPLA | |
| | RGNSRFAWMTRKSEETITPWNFEEVVDKGASAQSFIERMTNFDKNLPNEKVLPKHSL | |
| | LYEYFTVYNELTKVKYVTEGMRKPAFLSGEQKKAIVDLLFKTNRKVTVKQLKEDYFK | |
| | KIECFDSVEISGVEDRFNASLGTYHDLLKIIKDKDFLDNEENEDILEDIVLTLTLFE | |
| | DREMIEERLKTYAHLFDDKVMKQLKRRRYTGWGRLSRKLINGIRDKQSGKTILDFLK | |
| | SDGFANRNFMQLIHDDSLTFKEDIQKAQVSGQGDSLHEHIANLAGSPAIKKGILQTV | |
| | KVVDELVKVMGRHKPENIVIEMARENQTTQKGQKNSRERMKRIEEGIKELGSQILKE | |
| | HPVENTQLQNEKLYLYYLQNGRDMYVDQELDINRLSDYDVDAIVPQSFLKDDSIDNK | |
| | VLTRSDKNRGKSDNVPSEEVVKKMKNYWRQLLNAKLITQRKFDNLTKAERGGLSELD | |
| | KAGFIKRQLVETRQITKHVAQILDSRMNTKYDENDKLIREVKVITLKSKLVSDFRKD | |
| | FQFYKVREINNYHHAHDAYLNAVVGTALIKKYPKLESEFVYGDYKVYDVRKMIAKSE | |
| | QEIGKATAKYFFYSNIMNFFKTEITLANGEIRKRPLIETNGETGEIVWDKGRDFATV | |
| | RKVLSMPQVNIVKKTEVQTGGFSKESILPKRNSDKLIARKKDWDPKKYGGFDSPTVA | |
| | YSVLVVAKVEKGKSKKLKSVKELLGITIMERSSFEKNPIDFLEAKGYKEVKKDLIIK | |
| | LPKYSLFELENGRKRMLASAGELQKGNELALPSKYVNFLYLASHYEKLKGSPEDNEQ | |
| | KQLFVEQHKHYLDEIIEQISEFSKRVILADANLDKVLSAYNKHRDKPIREQAENIIH | |
| | LFTLTNLGAPAAFKYFDTTIDRKRYTSTKEVLDATLIHQSITGLYETRIDLSQLGGD | |
| Cas9 nickase | MDKKYSIGLDIGTNSVGWAVITDEYKVPSKKFKVLGNTDRHSIKKNLIGALLFDSGE | SEQ ID |
| Streptococcus | TAEATRLKRTARRRYTRRKNRICYLQEIFSNEMAKVDDSFFHRLEESFLVEEDKKHE | NO: 99 |
| pyogenes | RHPIFGNIVDEVAYHEKYPTIYHLRKKLVDSTDKADLRLIYLALAHMIKFRGHFLIE | |
| Q99ZW2 Cas9 | GDLNPDNSDVDKLFIQLVQTYNQLFEENPINASGVDAKAILSARLSKSRRLENLIAQ | |
| with R863X, | LPGEKKNGLFGNLIALSLGLTPNFKSNFDLAEDAKLQLSKDTYDDDLDNLLAQIGDQ | |
| wherein X is | YADLFLAAKNLSDAILLSDILRVNTEITKAPLSASMIKRYDEHHQDLTLLKALVRQQ | |
| any | LPEKYKEIFFDQSKNGYAGYIDGGASQEEFYKFIKPILEKMDGTEELLVKLNREDLL | |
| alternate | RKQRTFDNGSIPHQIHLGELHAILRRQEDFYPFLKDNREKIEKILTFRIPYYVGPLA | |
| amino acid | RGNSRFAWMTRKSEETITPWNFEEVVDKGASAQSFIERMTNFDKNLPNEKVLPKHSL | |
| | LYEYFTVYNELTKVKYVTEGMRKPAFLSGEQKKAIVDLLFKTNRKVTVKQLKEDYFK | |
| | KIECFDSVEISGVEDRFNASLGTYHDLLKIIKDKDFLDNEENEDILEDIVLTLTLFE | |
| | DREMIEERLKTYAHLFDDKVMKQLKRRRYTGWGRLSRKLINGIRDKQSGKTILDFLK | |
| | SDGFANRNFMQLIHDDSLTFKEDIQKAQVSGQGDSLHEHIANLAGSPAIKKGILQTV | |
| | KVVDELVKVMGRHKPENIVIEMARENQTTQKGQKNSRERMKRIEEGIKELGSQILKE | |
| | HPVENTQLQNEKLYLYYLQNGRDMYVDQELDINRLSDYDVDHIVPQSFLKDDSIDNK | |
| | VLTRSDKNXGKSDNVPSEEVVKKMKNYWRQLLNAKLITQRKFDNLTKAERGGLSELD | |
| | KAGFIKRQLVETRQITKHVAQILDSRMNTKYDENDKLIREVKVITLKSKLVSDFRKD | |
| | FQFYKVREINNYHHAHDAYLNAVVGTALIKKYPKLESEFVYGDYKVYDVRKMIAKSE | |
| | QEIGKATAKYFFYSNIMNFFKTEITLANGEIRKRPLIETNGETGEIVWDKGRDFATV | |
| | RKVLSMPQVNIVKKTEVQTGGFSKESILPKRNSDKLIARKKDWDPKKYGGFDSPTVA | |
| | YSVLVVAKVEKGKSKKLKSVKELLGITIMERSSFEKNPIDFLEAKGYKEVKKDLIIK | |
| | LPKYSLFELENGRKRMLASAGELQKGNELALPSKYVNFLYLASHYEKLKGSPEDNEQ | |
| | KQLFVEQHKHYLDEIIEQISEFSKRVILADANLDKVLSAYNKHRDKPIREQAENIIH | |
| | LFTLTNLGAPAAFKYFDTTIDRKRYTSTKEVLDATLIHQSITGLYETRIDLSQLGGD | |
| Cas9 nickase | MDKKYSIGLDIGTNSVGWAVITDEYKVPSKKFKVLGNTDRHSIKKNLIGALLFDSGE | SEQ ID |
| Streptococcus | TAEATRLKRTARRRYTRRKNRICYLQEIFSNEMAKVDDSFFHRLEESFLVEEDKKHE | NO: 100 |
| pyogenes | RHPIFGNIVDEVAYHEKYPTIYHLRKKLVDSTDKADLRLIYLALAHMIKFRGHFLIE | |
| Q99ZW2 Cas9 | GDLNPDNSDVDKLFIQLVQTYNQLFEENPINASGVDAKAILSARLSKSRRLENLIAQ | |
| with R863A | LPGEKKNGLFGNLIALSLGLTPNFKSNFDLAEDAKLQLSKDTYDDDLDNLLAQIGDQ | |
| | YADLFLAAKNLSDAILLSDILRVNTEITKAPLSASMIKRYDEHHQDLTLLKALVRQQ | |
| | LPEKYKEIFFDQSKNGYAGYIDGGASQEEFYKFIKPILEKMDGTEELLVKLNREDLL | |
| | RKQRTFDNGSIPHQIHLGELHAILRRQEDFYPFLKDNREKIEKILTFRIPYYVGPLA | |
| | RGNSRFAWMTRKSEETITPWNFEEVVDKGASAQSFIERMTNFDKNLPNEKVLPKHSL | |
| | LYEYFTVYNELTKVKYVTEGMRKPAFLSGEQKKAIVDLLFKTNRKVTVKQLKEDYFK | |
| | KIECFDSVEISGVEDRFNASLGTYHDLLKIIKDKDFLDNEENEDILEDIVLTLTLFE | |
| | DREMIEERLKTYAHLFDDKVMKQLKRRRYTGWGRLSRKLINGIRDKQSGKTILDFLK | |
| | SDGFANRNFMQLIHDDSLTFKEDIQKAQVSGQGDSLHEHIANLAGSPAIKKGILQTV | |
| | KVVDELVKVMGRHKPENIVIEMARENQTTQKGQKNSRERMKRIEEGIKELGSQILKE | |
| | HPVENTQLQNEKLYLYYLQNGRDMYVDQELDINRLSDYDVDHIVPQSFLKDDSIDNK | |
| | VLTRSDKNAGKSDNVPSEEVVKKMKNYWRQLLNAKLITQRKFDNLTKAERGGLSELD | |
| | KAGFIKRQLVETRQITKHVAQILDSRMNTKYDENDKLIREVKVITLKSKLVSDFRKD | |
| | FQFYKVREINNYHHAHDAYLNAVVGTALIKKYPKLESEFVYGDYKVYDVRKMIAKSE | |
| | QEIGKATAKYFFYSNIMNFFKTEITLANGEIRKRPLIETNGETGEIVWDKGRDFATV | |
| | RKVLSMPQVNIVKKTEVQTGGFSKESILPKRNSDKLIARKKDWDPKKYGGFDSPTVA | |
| | YSVLVVAKVEKGKSKKLKSVKELLGITIMERSSFEKNPIDFLEAKGYKEVKKDLIIK | |
| | LPKYSLFELENGRKRMLASAGELQKGNELALPSKYVNFLYLASHYEKLKGSPEDNEQ | |
| | KQLFVEQHKHYLDEIIEQISEFSKRVILADANLDKVLSAYNKHRDKPIREQAENIIH | |
| | LFTLTNLGAPAAFKYFDTTIDRKRYTSTKEVLDATLIHQSITGLYETRIDLSQLGGD | |

[0146] In some embodiments, the N-terminal methionine is removed from a Cas9 nickase, or from any Cas9 variant, ortholog, or equivalent disclosed or contemplated herein. For example, methionine-minus Cas9 nickases include the following sequences, or a variant thereof having an amino acid sequence that has at least 80%, at least 85%, at least 90%, at least 95%, or at least 99% sequence identity thereto.

| Description | Sequence |
|---|---|
| Cas9 nickase | DKKYSIGLDIGTNSVGWAVITDEYKVPSKKFKVLGNTDRHSIKKNLIGALLFDSGETAEATRLKRTARRR |
| (Met minus) | YTRRKNRICYLQEIFSNEMAKVDDSFFHRLEESFLVEEDKKHERHPIFGNIVDEVAYHEKYPTIYHLRKK |
| Streptococcus | LVDSTDKADLRLIYLALAHMIKFRGHFLIEGDLNPDNSDVDKLFIQLVQTYNQLFEENPINASGVDAKAI |
| pyogenes | LSARLSKSRRLENLIAQLPGEKKNGLFGNLIALSLGLTPNFKSNFDLAEDAKLQLSKDTYDDDLDNLLAQ |
| Q99ZW2 Cas9 | IGDQYADLFLAAKNLSDAILLSDILRVNTEITKAPLSASMIKRYDEHHQDLTLLKALVRQQLPEKYKEIF |
| with H840X, | FDQSKNGYAGYIDGGASQEEFYKFIKPILEKMDGTEELLVKLNREDLLRKQRTFDNGSIPHQIHLGELHA |
| wherein X is | ILRRQEDFYPFLKDNREKIEKILTFRIPYYVGPLARGNSRFAWMTRKSEETITPWNFEEVVDKGASAQSF |
| any | IERMTNFDKNLPNEKVLPKHSLLYEYFTVYNELTKVKYVTEGMRKPAFLSGEQKKAIVDLLFKTNRKVTV |
| alternate | KQLKEDYFKKIECFDSVEISGVEDRFNASLGTYHDLLKIIKDKDFLDNEENEDILEDIVLTLTLFEDREM |
| amino acid | IEERLKTYAHLFDDKVMKQLKRRRYTGWGRLSRKLINGIRDKQSGKTILDFLKSDGFANRNFMQLIHDDS |
| | LTFKEDIQKAQVSGQGDSLHEHIANLAGSPAIKKGILQTVKVVDELVKVMGRHKPENIVIEMARENQTTQ |
| | KGQKNSRERMKRIEEGIKELGSQILKEHPVENTQLQNEKLYLYYLQNGRDMYVDQELDINRLSDYDVDXI |
| | VPQSFLKDDSIDNKVLTRSDKNRGKSDNVPSEEVVKKMKNYWRQLLNAKLITQRKFDNLTKAERGGLSEL |
| | DKAGFIKRQLVETRQITKHVAQILDSRMNTKYDENDKLIREVKVITLKSKLVSDFRKDFQFYKVREINNY |
| | HHAHDAYLNAVVGTALIKKYPKLESEFVYGDYKVYDVRKMIAKSEQEIGKATAKYFFYSNIMNFFKTEIT |
| | LANGEIRKRPLIETNGETGEIVWDKGRDFATVRKVLSMPQVNIVKKTEVQTGGFSKESILPKRNSDKLIA |
| | RKKDWDPKKYGGFDSPTVAYSVLVVAKVEKGKSKKLKSVKELLGITIMERSSFEKNPIDFLEAKGYKEVK |
| | KDLIIKLPKYSLFELENGRKRMLASAGELQKGNELALPSKYVNFLYLASHYEKLKGSPEDNEQKQLFVEQ |
| | HKHYLDEIIEQISEFSKRVILADANLDKVLSAYNKHRDKPIREQAENIIHLFTLTNLGAPAAFKYFDTTI |
| | DRKRYTSTKEVLDATLIHQSITGLYETRIDLSQLGGD (SEQ ID NO: 101) |
| Cas9 nickase | DKKYSIGLDIGTNSVGWAVITDEYKVPSKKFKVLGNTDRHSIKKNLIGALLFDSGETAEATRLKRTARRR |
| (Met minus) | YTRRKNRICYLQEIFSNEMAKVDDSFFHRLEESFLVEEDKKHERHPIFGNIVDEVAYHEKYPTIYHLRKK |
| Streptococcus | LVDSTDKADLRLIYLALAHMIKFRGHFLIEGDLNPONSDVDKLFIQLVQTYNQLFEENPINASGVDAKAI |
| pyogenes | LSARLSKSRRLENLIAQLPGEKKNGLFGNLIALSLGLTPNFKSNFDLAEDAKLQLSKDTYDDDLDNLLAQ |
| Q99ZW2 Cas9 | IGDQYADLFLAAKNLSDAILLSDILRVNTEITKAPLSASMIKRYDEHHQDLTLLKALVRQQLPEKYKEIF |
| with H840A | FDQSKNGYAGYIDGGASQEEFYKFIKPILEKMDGTEELLVKLNREDLLRKQRTFDNGSIPHQIHLGELHA |
| | ILRRQEDFYPFLKDNREKIEKILTFRIPYYVGPLARGNSRFAWMTRKSEETITPWNFEEVVDKGASAQSF |
| | IERMTNFDKNLPNEKVLPKHSLLYEYFTVYNELTKVKYVTEGMRKPAFLSGEQKKAIVDLLFKTNRKVTV |
| | KQLKEDYFKKIECFDSVEISGVEDRFNASLGTYHDLLKIIKDKDFLDNEENEDILEDIVLTLTLFEDREM |
| | IEERLKTYAHLFDDKVMKQLKRRRYTGWGRLSRKLINGIRDKQSGKTILDFLKSDGFANRNFMQLIHDDS |
| | LTFKEDIQKAQVSGQGDSLHEHIANLAGSPAIKKGILQTVKVVDELVKVMGRHKPENIVIEMARENQTTQ |
| | KGQKNSRERMKRIEEGIKELGSQILKEHPVENTQLQNEKLYLYYLQNGRDMYVDQELDINRLSDYDVDAI |
| | VPQSFLKDDSIDNKVLTRSDKNRGKSDNVPSEEVVKKMKNYWRQLLNAKLITQRKFDNLTKAERGGLSEL |
| | DKAGFIKRQLVETRQITKHVAQILDSRMNTKYDENDKLIREVKVITLKSKLVSDFRKDFQFYKVREINNY |
| | HHAHDAYLNAVVGTALIKKYPKLESEFVYGDYKVYDVRKMIAKSEQEIGKATAKYFFYSNIMNFFKTEIT |
| | LANGEIRKRPLIETNGETGEIVWDKGRDFATVRKVLSMPQVNIVKKTEVQTGGFSKESILPKRNSDKLIA |
| | RKKDWDPKKYGGFDSPTVAYSVLVVAKVEKGKSKKLKSVKELLGITIMERSSFEKNPIDFLEAKGYKEVK |
| | KDLIIKLPKYSLFELENGRKRMLASAGELQKGNELALPSKYVNFLYLASHYEKLKGSPEDNEQKQLFVEQ |
| | HKHYLDEIIEQISEFSKRVILADANLDKVLSAYNKHRDKPIREQAENIIHLFTLTNLGAPAAFKYFDTTI |
| | DRKRYTSTKEVLDATLIHQSITGLYETRIDLSQLGGD (SEQ ID NO: 102) |
| Cas9 nickase | DKKYSIGLDIGTNSVGWAVITDEYKVPSKKFKVLGNTDRHSIKKNLIGALLFDSGETAEATRLKRTARRR |
| (Met minus) | YTRRKNRICYLQEIFSNEMAKVDDSFFHRLEESFLVEEDKKHERHPIFGNIVDEVAYHEKYPTIYHLRKK |
| Streptococcus | LVDSTDKADLRLIYLALAHMIKFRGHFLIEGDLNPONSDVDKLFIQLVQTYNQLFEENPINASGVDAKAI |
| pyogenes | LSARLSKSRRLENLIAQLPGEKKNGLFGNLIALSLGLTPNFKSNFDLAEDAKLQLSKDTYDDDLDNLLAQ |
| Q99ZW2 Cas9 | IGDQYADLFLAAKNLSDAILLSDILRVNTEITKAPLSASMIKRYDEHHQDLTLLKALVRQQLPEKYKEIF |
| with R863X, | FDQSKNGYAGYIDGGASQEEFYKFIKPILEKMDGTEELLVKLNREDLLRKQRTFDNGSIPHQIHLGELHA |
| wherein X is | ILRRQEDFYPFLKDNREKIEKILTFRIPYYVGPLARGNSRFAWMTRKSEETITPWNFEEVVDKGASAQSF |
| any | IERMTNFDKNLPNEKVLPKHSLLYEYFTVYNELTKVKYVTEGMRKPAFLSGEQKKAIVDLLFKTNRKVTV |
| alternate | KQLKEDYFKKIECFDSVEISGVEDRFNASLGTYHDLLKIIKDKDFLDNEENEDILEDIVLTLTLFEDREM |
| amino acid | IEERLKTYAHLFDDKVMKQLKRRRYTGWGRLSRKLINGIRDKQSGKTILDFLKSDGFANRNFMQLIHDDS |
| | LTFKEDIQKAQVSGQGDSLHEHIANLAGSPAIKKGILQTVKVVDELVKVMGRHKPENIVIEMARENQTTQ |
| | KGQKNSRERMKRIEEGIKELGSQILKEHPVENTQLQNEKLYLYYLQNGRDMYVDQELDINRLSDYDVDHI |
| | VPQSFLKDDSIDNKVLTRSDKNXGKSDNVPSEEVVKKMKNYWRQLLNAKLITQRKFDNLTKAERGGLSEL |
| | DKAGFIKRQLVETRQITKHVAQILDSRMNTKYDENDKLIREVKVITLKSKLVSDFRKDFQFYKVREINNY |
| | HHAHDAYLNAVVGTALIKKYPKLESEFVYGDYKVYDVRKMIAKSEQEIGKATAKYFFYSNIMNFFKTEIT |
| | LANGEIRKRPLIETNGETGEIVWDKGRDFATVRKVLSMPQVNIVKKTEVQTGGFSKESILPKRNSDKLIA |
| | RKKDWDPKKYGGFDSPTVAYSVLVVAKVEKGKSKKLKSVKELLGITIMERSSFEKNPIDFLEAKGYKEVK |
| | KDLIIKLPKYSLFELENGRKRMLASAGELQKGNELALPSKYVNFLYLASHYEKLKGSPEDNEQKQLFVEQ |
| | HKHYLDEIIEQISEFSKRVILADANLDKVLSAYNKHRDKPIREQAENIIHLFTLTNLGAPAAFKYFDTTI |
| | DRKRYTSTKEVLDATLIHQSITGLYETRIDLSQLGGD (SEQ ID NO: 103) |
| Cas9 nickase | DKKYSIGLDIGTNSVGWAVITDEYKVPSKKFKVLGNTDRHSIKKNLIGALLFDSGETAEATRLKRTARRR |
| (Met minus) | YTRRKNRICYLQEIFSNEMAKVDDSFFHRLEESFLVEEDKKHERHPIFGNIVDEVAYHEKYPTIYHLRKK |
| Streptococcus | LVDSTDKADLRLIYLALAHMIKFRGHFLIEGDLNPDNSDVDKLFIQLVQTYNQLFEENPINASGVDAKAI |
| pyogenes | LSARLSKSRRLENLIAQLPGEKKNGLFGNLIALSLGLTPNFKSNFDLAEDAKLQLSKDTYDDDLDNLLAQ |
| Q99ZW2 Cas9 | IGDQYADLFLAAKNLSDAILLSDILRVNTEITKAPLSASMIKRYDEHHQDLTLLKALVRQQLPEKYKEIF |
| with R863A | FDQSKNGYAGYIDGGASQEEFYKFIKPILEKMDGTEELLVKLNREDLLRKQRTFDNGSIPHQIHLGELHA |
| | ILRRQEDFYPFLKDNREKIEKILTFRIPYYVGPLARGNSRFAWMTRKSEETITPWNFEEVVDKGASAQSF |
| | IERMTNFDKNLPNEKVLPKHSLLYEYFTVYNELTKVKYVTEGMRKPAFLSGEQKKAIVDLLFKTNRKVTV |
| | KQLKEDYFKKIECFDSVEISGVEDRFNASLGTYHDLLKIIKDKDFLDNEENEDILEDIVLTLTLFEDREM |
| | IEERLKTYAHLFDDKVMKQLKRRRYTGWGRLSRKLINGIRDKQSGKTILDFLKSDGFANRNFMQLIHDDS |
| | LTFKEDIQKAQVSGQGDSLHEHIANLAGSPAIKKGILQTVKVVDELVKVMGRHKPENIVIEMARENQTTQ |
| | KGQKNSRERMKRIEEGIKELGSQILKEHPVENTQLQNEKLYLYYLQNGRDMYVDQELDINRLSDYDVDHI |
| | VPQSFLKDDSIDNKVLTRSDKNAGKSDNVPSEEVVKKMKNYWRQLLNAKLITQRKFDNLTKAERGGLSEL |
| | DKAGFIKRQLVETRQITKHVAQILDSRMNTKYDENDKLIREVKVITLKSKLVSDFRKDFQFYKVREINNY |
| | HHAHDAYLNAVVGTALIKKYPKLESEFVYGDYKVYDVRKMIAKSEQEIGKATAKYFFYSNIMNFFKTEIT |
| | LANGEIRKRPLIETNGETGEIVWDKGRDFATVRKVLSMPQVNIVKKTEVQTGGFSKESILPKRNSDKLIA |
| | RKKDWDPKKYGGFDSPTVAYSVLVVAKVEKGKSKKLKSVKELLGITIMERSSFEKNPIDFLEAKGYKEVK |
| | KDLIIKLPKYSLFELENGRKRMLASAGELQKGNELALPSKYVNFLYLASHYEKLKGSPEDNEQKQLFVEQ |
| | HKHYLDEIIEQISEFSKRVILADANLDKVLSAYNKHRDKPIREQAENIIHLFTLTNLGAPAAFKYFDTTI |
| | DRKRYTSTKEVLDATLIHQSITGLYETRIDLSQLGGD (SEQ ID NO: 104) |

[0147] Other Cas9 Variants

[0148] The napDNAbp domains used in the base editors described herein may also include other Cas9 variants that area at least about 80% identical, at least about 90% identical, at least about 95% identical, at least about 96% identical, at least about 97% identical, at least about 98% identical, at least about 99% identical, at least about 99.5% identical, or at least about 99.9% identical to any reference Cas9 protein, including any wild type Cas9, or mutant Cas9 (e.g., a dead Cas9 or Cas9 nickase), or circular permutant Cas9, or other variant of Cas9 disclosed herein or known in the art. In some embodiments, a Cas9 variant may have 1, 2, 3, 4, 5, 6, 7, 8, 9, 10, 11, 12, 13, 14, 15, 16, 17, 18, 19, 20, 21, 22, 21, 24, 25, 26, 27, 28, 29, 30, 31, 32, 33, 34, 35, 36, 37, 38, 39, 40, 41, 42, 43, 44, 45, 46, 47, 48, 49, 50, or more amino acid changes compared to a reference Cas9. In some embodiments, the Cas9 variant comprises a fragment of a reference Cas9 (e.g., a gRNA binding domain or a DNA-cleavage domain), such that the fragment is at least about 70% identical, at least about 80% identical, at least about 90% identical, at least about 95% identical, at least about 96% identical, at least about 97% identical, at least about 98% identical, at least about 99% identical, at least about 99.5% identical, or at least about 99.9% identical to the corresponding fragment of wild type Cas9. In some embodiments, the fragment is is at least 30%, at least 35%, at least 40%, at least 45%, at least 50%, at least 55%, at least 60%, at least 65%, at least 70%, at least 75%, at least 80%, at least 85%, at least 90%, at least 95% identical, at least 96%, at least 97%, at least 98%, at least 99%, or at least 99.5% of the amino acid length of a corresponding wild type Cas9 (e.g., SEQ ID NO: 9).

[0149] In some embodiments, the disclosure also may utilize Cas9 fragments which retain their functionality and which are fragments of any herein disclosed Cas9 protein. In some embodiments, the Cas9 fragment is at least 100 amino acids in length. In some embodiments, the fragment is at least 100, 150, 200, 250, 300, 350, 400, 450, 500, 550, 600, 650, 700, 750, 800, 850, 900, 950, 1000, 1050, 1100, 1150, 1200, 1250, or at least 1300 amino acids in length.

[0150] In various embodiments, the base editors disclosed herein may comprise one of the Cas9 variants described as follows, or a Cas9 variant thereof having at least about 70% identical, at least about 80% identical, at least about 90% identical, at least about 95% identical, at least about 96% identical, at least about 97% identical, at least about 98% identical, at least about 99% identical, at least about 99.5% identical, or at least about 99.9% identical to any reference Cas9 variants.

[0151] Other Cas9 Equivalents

[0152] In some embodiments, the base editors described herein can include any Cas9 equivalent. As used herein, the term “Cas9 equivalent” is a broad term that encompasses any napDNAbp protein that serves the same function as Cas9 in the present base editors despite that its amino acid primary sequence and/or its three-dimensional structure may be different and/or unrelated from an evolutionary standpoint. Thus, while Cas9 equivalents include any Cas9 ortholog, homolog, mutant, or variant described or embraced herein that are evolutionarily related, the Cas9 equivalents also embrace proteins that may have evolved through convergent evolution processes to have the same or similar function as Cas9, but which do not necessarily have any similarity with regard to amino acid sequence and/or three dimensional structure. The base editors described here embrace any Cas9 equivalent that would provide the same or similar function as Cas9 despite that the Cas9 equivalent may be based on a protein that arose through convergent evolution.

[0153] For example, CasX is a Cas9 equivalent that reportedly has the same function as Cas9 but which evolved through convergent evolution. Thus, the CasX protein described in Liu et al., “CasX enzymes comprises a distinct family of RNA-guided genome editors,” Nature, 2019, Vol. 566: 218-223, is contemplated to be used with the base editors described herein. In addition, any variant or modification of CasX is conceivable and within the scope of the present disclosure.

[0154] Cas9 is a bacterial enzyme that evolved in a wide variety of species. However, the Cas9 equivalents contemplated herein may also be obtained from archaea, which constitute a domain and kingdom of single-celled prokaryotic microbes different from bacteria.

[0155] In some embodiments, Cas9 equivalents may refer to CasX or CasY, which have been described in, for example, Burstein et al., “New CRISPR-Cas systems from uncultivated microbes.” Cell Res. 2017 Feb. 21. doi: 10.1038/cr.2017.21, the entire contents of which is hereby incorporated by reference. Using genome-resolved metagenomics, a number of CRISPR-Cas systems were identified, including the first reported Cas9 in the archaeal domain of life. This divergent Cas9 protein was found in little-studied nanoarchaea as part of an active CRISPR-Cas system. In bacteria, two previously unknown systems were discovered, CRISPR-CasX and CRISPR-CasY, which are among the most compact systems yet discovered. In some embodiments, Cas9 refers to CasX, or a variant of CasX. In some embodiments, Cas9 refers to a CasY, or a variant of CasY. It should be appreciated that other RNA-guided DNA binding proteins may be used as a nucleic acid programmable DNA binding protein (napDNAbp), and are within the scope of this disclosure. Also see Liu et al., “CasX enzymes comprises a distinct family of RNA-guided genome editors,” Nature, 2019, Vol. 566: 218-223. Any of these Cas9 equivalents are contemplated.

[0156] In some embodiments, the Cas9 equivalent comprises an amino acid sequence that is at least 85%, at least 90%, at least 91%, at least 92%, at least 93%, at least 94%, at least 95%, at least 96%, at least 97%, at least 98%, at least 99%, or at least 99.5% identical to a naturally-occurring CasX or CasY protein. In some embodiments, the napDNAbp is a naturally-occurring CasX or CasY protein. In some embodiments, the napDNAbp comprises an amino acid sequence that is at least 85%, at least 90%, at least 91%, at least 92%, at least 93%, at least 94%, at least 95%, at least 96%, at least 97%, at least 98%, at least 99%, or at least 99.5% identical to a wild-type Cas moiety or any Cas moiety provided herein.

[0157] In various embodiments, the nucleic acid programmable DNA binding proteins include, without limitation, Cas9 (e.g., dCas9 and nCas9), CasX, CasY, Cpf1, C2c1, C2c2, C2C3, Argonaute, Cas12a, and Cas12b. One example of a nucleic acid programmable DNA-binding protein that has different PAM specificity than Cas9 is Clustered Regularly Interspaced Short Palindromic Repeats from Prevotella and Francisella 1 (Cpf1). Similar to Cas9, Cpf1 is also a class 2 CRISPR effector. It has been shown that Cpf1 mediates robust DNA interference with features distinct from Cas9. Cpf1 is a single RNA-guided endonuclease lacking tracrRNA, and it utilizes a T-rich protospacer-adjacent motif (TTN, TTTN, or YTN). Moreover, Cpf1 cleaves DNA via a staggered DNA double-stranded break. Out of 16 Cpf1-family proteins, two enzymes from Acidaminococcus and Lachnospiraceae are shown to have efficient genome-editing activity in human cells. Cpf1 proteins are known in the art and have been described previously, for example Yamano et al., “Crystal structure of Cpf1 in complex with guide RNA and target DNA.” Cell (165) 2016, p. 949-962; the entire contents of which is hereby incorporated by reference. The state of the art may also now refer to Cpf1 enzymes as Cas12a.

[0158] In still other embodiments, the Cas protein may include any CRISPR associated protein, including but not limited to Cas12a, Cas12b, Cas1, Cas1B, Cas2, Cas3, Cas4, Cas5, Cas6, Cas7, Cas8, Cas9 (sometimes referred to as Csn1 and Csx12), Cas10, Csy1, Csy2, Csy3, Cse1, Cse2, Csc1, Csc2, Csa5, Csn2. Csm2, Csm3, Csm4, Csm5, Csm6, Cmr1, Cmr3, Cmr4, Cmr5, Cmr6, Csb1, Csb2, Csb3, Csx17, Csx14, Csx10, Csx16, CsaX, Csx3, Csx1, Csx15, Csf1, Csf2, Csf3, Csf4, homologs thereof, or modified versions thereof, and preferably comprising a nickase mutation (e.g., a mutation corresponding to the D10A mutation of the wild type SpCas9 polypeptide of SEQ ID NO: 9).

[0159] In various other embodiments, the napDNAbp can be any of the following proteins: a Cas9, a Cpf1, a CasX, a CasY, a C2c1, a C2c2, a C2c3, a GeoCas9, a CjCas9, a Cas12a, a Cas12b, a Cas12g, a Cas12h, a Cas12i, a Cas13b, a Cas13c, a Cas13d, a Cas14, a Csn2, an xCas9, an SpCas9-NG, a circularly permuted Cas9, or an Argonaute (Ago), a Cas9-KKH, a SmacCas9, a Spy-macCas9, an SpCas9-VRQR, an SpCas9-NRRH, an SpaCas9-NRTH, an SpCas9-NRCH, or a variant thereof.

[0160] In certain embodiments, the base editors contemplated herein can include a Cas9 protein that is of smaller molecular weight than the canonical SpCas9 sequence. In some embodiments, the smaller-sized Cas9 variants may facilitate delivery to cells, e.g., by an expression vector, nanoparticle, or other means of delivery. The canonical SpCas9 protein is 1368 amino acids in length and has a predicted molecular weight of 158 kilodaltons. The term “small-sized Cas9 variant”, as used herein, refers to any Cas9 variant—naturally occurring, engineered, or otherwise—that is less than at least 1300 amino acids, or at least less than 1290 amino acids, or than less than 1280 amino acids, or less than 1270 amino acid, or less than 1260 amino acid, or less than 1250 amino acids, or less than 1240 amino acids, or less than 1230 amino acids, or less than 1220 amino acids, or less than 1210 amino acids, or less than 1200 amino acids, or less than 1190 amino acids, or less than 1180 amino acids, or less than 1170 amino acids, or less than 1160 amino acids, or less than 1150 amino acids, or less than 1140 amino acids, or less than 1130 amino acids, or less than 1120 amino acids, or less than 1110 amino acids, or less than 1100 amino acids, or less than 1050 amino acids, or less than 1000 amino acids, or less than 950 amino acids, or less than 900 amino acids, or less than 850 amino acids, or less than 800 amino acids, or less than 750 amino acids, or less than 700 amino acids, or less than 650 amino acids, or less than 600 amino acids, or less than 550 amino acids, or less than 500 amino acids, but at least larger than about 400 amino acids and retaining the required functions of the Cas9 protein.

[0161] In various embodiments, the base editors disclosed herein may comprise one of the small-sized Cas9 variants described as follows, or a Cas9 variant thereof having at least about 70% identical, at least about 80% identical, at least about 90% identical, at least about 95% identical, at least about 96% identical, at least about 97% identical, at least about 98% identical, at least about 99% identical, at least about 99.5% identical, or at least about 99.9% identical to any reference small-sized Cas9 protein. Exemplary small-sized Cas9 variants include, but are not limited to, SaCas9 and LbCas12a.

[0162] In some embodiments, the base editors described herein may also comprise Cas12a/Cpf1 (dCpf1) variants that may be used as a guide nucleotide sequence-programmable DNA-binding protein domain. The Cas12a/Cpf1 protein has a RuvC-like endonuclease domain that is similar to the RuvC domain of Cas9 but does not have a HNH endonuclease domain, and the N-terminal of Cpf1 does not have the alpha-helical recognition lobe of Cas9. It was shown in Zetsche et al., Cell, 163, 759-771, 2015 (which is incorporated herein by reference) that, the RuvC-like domain of Cpf1 is responsible for cleaving both DNA strands and inactivation of the RuvC-like domain inactivates Cpf1 nuclease activity.

| | | SEQ ID |
|---|---|---|
| Description | Sequence | NO: |
| SaCas9 | MGKRNYILGLDIGITSVGYGIIDYETRDVIDAGVRLFKEANVENNEGRRSKRGARRL | SEQ ID |
| Staphylococcus | KRRRRHRIQRVKKLLFDYNLLTDHSELSGINPYEARVKGLSQKLSEEEFSAALLHLA | NO: 105 |
| aureus | KRRGVHNVNEVEEDTGNELSTKEQISRNSKALEEKYVAELQLERLKKDGEVRGSINR | |
| 1053 AA | FKTSDYVKEAKQLLKVQKAYHQLDQSFIDTYIDLLETRRTYYEGPGEGSPFGWKDIK | |
| 123 kDa | EWYEMLMGHCTYFPEELRSVKYAYNADLYNALNDLNNLVITRDENEKLEYYEKFQII | |
| | ENVFKQKKKPTLKQIAKEILVNEEDIKGYRVTSTGKPEFTNLKVYHDIKDITARKEI | |
| | IENAELLDQIAKILTIYQSSEDIQEELTNLNSELTQEEIEQISNLKGYTGTHNLSLK | |
| | AINLILDELWHTNDNQIAIFNRLKLVPKKVDLSQQKEIPTTLVDDFILSPVVKRSFI | |
| | QSIKVINAIIKKYGLPNDIIIELAREKNSKDAQKMINEMQKRNRQTNERIEEIIRTT | |
| | GKENAKYLIEKIKLHDMQEGKCLYSLEAIPLEDLLNNPFNYEVDHIIPRSVSFDNSF | |
| | NNKVLVKQEENSKKGNRTPFQYLSSSDSKISYETFKKHILNLAKGKGRISKTKKEYL | |
| | LEERDINRFSVQKDFINRNLVDTRYATRGLMNLLRSYFRVNNLDVKVKSINGGFTSF | |
| | LRRKWKFKKERNKGYKHHAEDALIIANADFIFKEWKKLDKAKKVMENQMFEEKQAES | |
| | MPEIETEQEYKEIFITPHQIKHIKDFKDYKYSHRVDKKPNRKLINDTLYSTRKDDKG | |
| | NTLIVNNLNGLYDKDNDKLKKLINKSPEKLLMYHHDPQTYQKLKLIMEQYGDEKNPL | |
| | YKYYEETGNYLTKYSKKONGPVIKKIKYYGNKLNAHLDITDDYPNSRNKVVKLSLKP | |
| | YRFDVYLDNGVYKFVTVKNLDVIKKENYYEVNSKCYEEAKKLKKISNQAEFIASFYK | |
| | NDLIKINGELYRVIGVNNDLLNRIEVNMIDITYREYLENMNDKRPPHIIKTIASKTQ | |
| | SIKKYSTDILGNLYEVKSKKHPQIIKK | |
| NmeCas9 | MAAFKPNSINYILGLDIGIASVGWAMVEIDEEENPIRLIDLGVRVFERAEVPKTGDS | SEQ ID |
| N. | LAMARRLARSVRRLTRRRAHRLLRTRRLLKREGVLQAANFDENGLIKSLPNTPWQLR | NO: 106 |
| meningitidis | AAALDRKLTPLEWSAVLLHLIKHRGYLSQRKNEGETADKELGALLKGVAGNAHALQT | |
| 1083 AA | GDFRTPAELALNKFEKESGHIRNQRSDYSHTFSRKDLQAELILLFEKQKEFGNPHVS | |
| 124.5 kDa | GGLKEGIETLLMTQRPALSGDAVQKMLGHCTFEPAEPKAAKNTYTAERFIWLTKLNN | |
| | LRILEQGSERPLTDTERATLMDEPYRKSKLTYAQARKLLGLEDTAFFKGLRYGKDNA | |
| | EASTLMEMKAYHAISRALEKEGLKDKKSPLNLSPELQDEIGTAFSLFKTDEDITGRL | |
| | KDRIQPEILEALLKHISFDKFVQISLKALRRIVPLMEQGKRYDEACAEIYGDHYGKK | |
| | NTEEKIYLPPIPADEIRNPVVLRALSQARKVINGVVRRYGSPARIHIETAREVGKSF | |
| | KDRKEIEKRQEENRKDREKAAAKFREYFPNFVGEPKSKDILKLRLYEQQHGKCLYSG | |
| | KEINLGRLNEKGYVEIDAALPFSRTWDDSFNNKVLVLGSENQNKGNQTPYEYFNGKD | |
| | NSREWQEFKARVETSRFPRSKKQRILLQKFDEDGFKERNLNDTRYVNRFLCQFVADR | |
| | MRLTGKGKKRVFASNGQITNLLRGFWGLRKVRAENDRHHALDAVVVACSTVAMQQKI | |
| | TRFVRYKEMNAFDGKTIDKETGEVLHQKTHFPQPWEFFAQEVMIRVFGKPDGKPEFE | |
| | EADTLEKLRTLLAEKLSSRPEAVHEYVTPLFVSRAPNRKMSGQGHMETVKSAKRLDE | |
| | GVSVLRVPLTQLKLKDLEKMVNREREPKLYEALKARLEARKDDPAKAFAEPFYKYDK | |
| | AGNRTQQVKAVRVEQVQKTGVWVRNHNGIADNATMVRVDVFEKGDKYYLVPIYSWQV | |
| | AKGILPDRAVVQGKDEEDWQLIDDSFNFKFSLHPNDLVEVITKKARMFGYFASCHRG | |
| | TGNINIRIHDLDHKIGKNGILEGIGVKTALSFQKYQIDELGKEIRPCRLKKRPPVR | |
| CjCas9 | MARILAFDIGISSIGWAFSENDELKDCGVRIFTKVENPKTGESLALPRRLARSARKR | SEQ ID |
| C. jejuni | LARRKARLNHLKHLIANEFKLNYEDYQSFDESLAKAYKGSLISPYELRFRALNELLS | NO: 107 |
| 984 AA | KQDFARVILHIAKRRGYDDIKNSDDKEKGAILKAIKQNEEKLANYQSVGEYLYKEYF | |
| 114.9 kDa | QKFKENSKEFTNVRNKKESYERCIAQSFLKDELKLIFKKQREFGFSFSKKFEEEVLS | |
| | VAFYKRALKDFSHLVGNCSFFTDEKRAPKNSPLAFMFVALTRIINLLNNLKNTEGIL | |
| | YTKDDLNALLNEVLKNGTLTYKQTKKLLGLSDDYEFKGEKGTYFIEFKKYKEFIKAL | |
| | GEHNLSQDDLNEIAKDITLIKDEIKLKKALAKYDLNQNQIDSLSKLEFKDHLNISFK | |
| | ALKLVTPLMLEGKKYDEACNELNLKVAINEDKKDFLPAFNETYYKDEVTNPVVLRAI | |
| | KEYRKVLNALLKKYGKVHKINIELAREVGKNHSQRAKIEKEQNENYKAKKDAELECE | |
| | KLGLKINSKNILKLRLFKEQKEFCAYSGEKIKISDLQDEKMLEIDHIYPYSRSFDDS | |
| | YMNKVLVFTKQNQEKLNQTPFEAFGNDSAKWQKIEVLAKNLPTKKQKRILDKNYKDK | |
| | EQKNFKDRNLNDTRYIARLVLNYTKDYLDFLPLSDDENTKLNDTQKGSKVHVEAKSG | |
| | MLTSALRHTWGFSAKDRNNHLHHAIDAVIIAYANNSIVKAFSDFKKEQESNSAELYA | |
| | KKISELDYKNKRKFFEPFSGFRQKVLDKIDEIFVSKPERKKPSGALHEETFRKEEEF | |
| | YQSYGGKEGVLKALELGKIRKVNGKIVKNGDMFRVDIFKHKKTNKFYAVPIYTMDFA | |
| | LKVLPNKAVARSKKGEIKDWILMDENYEFCFSLYKDSLILIQTKDMQEPEFVYYNAF | |
| | TSSTVSLIVSKHDNKFETLSKNQKILFKNANEKEVIAKSIGIQNLKVFEKYIVSALG | |
| | EVTKAEFRQREDFKK | |
| GeoCas9 | MRYKIGLDIGITSVGWAVMNLDIPRIEDLGVRIFDRAENPQTGESLALPRRLARSAR | SEQ ID |
| G. | RRLRRRKHRLERIRRLVIREGILTKEELDKLFEEKHEIDVWQLRVEALDRKLNNDEL | NO: 108 |
| stearo- | ARVLLHLAKRRGFKSNRKSERSNKENSTMLKHIEENRAILSSYRTVGEMIVKDPKFA | |
| thermophilus | LHKRNKGENYTNTIARDDLEREIRLIFSKQREFGNMSCTEEFENEYITIWASQRPVA | |
| 1087 AA | SKDDIEKKVGFCTFEPKEKRAPKATYTFQSFIAWEHINKLRLISPSGARGLTDEERR | |
| 127 kDa | LLYEQAFQKNKITYHDIRTLLHLPDDTYFKGIVYDRGESRKQNENIRFLELDAYHQI | |
| | RKAVDKVYGKGKSSSFLPIDFDTFGYALTLFKDDADIHSYLRNEYEQNGKRMPNLAN | |
| | KVYDNELIEELLNLSFTKFGHLSLKALRSILPYMEQGEVYSSACERAGYTFTGPKKK | |
| | QKTMLLPNIPPIANPVVMRALTQARKVVNAIIKKYGSPVSIHIELARDLSQTFDERR | |
| | KTKKEQDENRKKNETAIRQLMEYGLTLNPTGHDIVKFKLWSEQNGRCAYSLQPIEIE | |
| | RLLEPGYVEVDHVIPYSRSLDDSYTNKVLVLTRENREKGNRIPAEYLGVGTERWQQF | |
| | ETFVLTNKQFSKKKRDRLLRLHYDENEETEFKNRNLNDTRYISRFFANFIREHLKFA | |
| | ESDDKQKVYTVNGRVTAHLRSRWEFNKNREESDLHHAVDAVIVACTTPSDIAKVTAF | |
| | YQRREQNKELAKKTEPHFPQPWPHFADELRARLSKHPKESIKALNLGNYDDQKLESL | |
| | QPVFVSRMPKRSVTGAAHQETLRRYVGIDERSGKIQTVVKTKLSEIKLDASGHFPMY | |
| | GKESDPRTYEAIRQRLLEHNNDPKKAFQEPLYKPKKNGEPGPVIRTVKIIDTKNQVI | |
| | PLNDGKTVAYNSNIVRVDVFEKDGKYYCVPVYTMDIMKGILPNKAIEPNKPYSEWKE | |
| | MTEDYTFRFSLYPNDLIRIELPREKTVKTAAGEEINVKDVFVYYKTIDSANGGLELI | |
| | SHDHRFSLRGVGSRTLKRFEKYQVDVLGNIYKVRGEKRVGLASSAHSKPGKTIRPLQ | |
| | STRD | |
| LbCas12a | MSKLEKFTNCYSLSKTLRFKAIPVGKTQENIDNKRLLVEDEKRAEDYKGVKKLLDRY | SEQ ID |
| L. bacterium | YLSFINDVLHSIKLKNLNNYISLFRKKTRTEKENKELENLEINLRKEIAKAFKGNEG | NO: 109 |
| 1228 AA | YKSLFKKDIIETILPEFLDDKDEIALVNSFNGFTTAFTGFFDNRENMFSEEAKSTSI | |
| 143.9 kDa | AFRCINENLTRYISNMDIFEKVDAIFDKHEVQEIKEKILNSDYDVEDFFEGEFFNFV | |
| | LTQEGIDVYNAIIGGFVTESGEKIKGLNEYINLYNQKTKQKLPKFKPLYKQVLSDRE | |
| | SLSFYGEGYTSDEEVLEVFRNTLNKNSEIFSSIKKLEKLFKNFDEYSSAGIFVKNGP | |
| | AISTISKDIFGEWNVIRDKWNAEYDDIHLKKKAVVTEKYEDDRRKSFKKIGSFSLEQ | |
| | LQEYADADLSVVEKLKEIIIQKVDEIYKVYGSSEKLFDADFVLEKSLKKNDAVVAIM | |
| | KDLLDSVKSFENYIKAFFGEGKETNRDESFYGDFVLAYDILLKVDHIYDAIRNYVTQ | |
| | KPYSKDKFKLYFQNPQFMGGWDKDKETDYRATILRYGSKYYLAIMDKKYAKCLQKID | |
| | KDDVNGNYEKINYKLLPGPNKMLPKVFFSKKWMAYYNPSEDIQKIYKNGTFKKGDMF | |
| | NLNDCHKLIDFFKDSISRYPKWSNAYDFNFSETEKYKDIAGFYREVEEQGYKVSFES | |
| | ASKKEVDKLVEEGKLYMFQIYNKDFSDKSHGTPNLHTMYFKLLFDENNHGQIRLSGG | |
| | AELFMRRASLKKEELVVHPANSPIANKNPDNPKKTTTLSYDVYKDKRFSEDQYELHI | |
| | PIAINKCPKNIFKINTEVRVLLKHDDNPYVIGIDRGERNLLYIVVVDGKGNIVEQYS | |
| | LNEIINNFNGIRIKTDYHSLLDKKEKERFEARQNWTSIENIKELKAGYISQVVHKIC | |
| | ELVEKYDAVIALEDLNSGFKNSRVKVEKQVYQKFEKMLIDKLNYMVDKKSNPCATGG | |
| | ALKGYQITNKFESFKSMSTQNGFIFYIPAWLTSKIDPSTGFVNLLKTKYTSIADSKK | |
| | FISSFDRIMYVPEEDLFEFALDYKNFSRTDADYIKKWKLYSYGNRIRIFRNPKKNNV | |
| | FDWEEVCLTSAYKELFNKYGINYQQGDIRALLCEQSDKAFYSSFMALMSLMLQMRNS | |
| | ITGRTDVDFLISPVKNSDGIFYDSRNYEAQENAILPKNADANGAYNIARKVLWAIGQ | |
| | FKKAEDEKLDKVKIAISNKEWLEYAQTSVKH | |
| BhCas12b | MATRSFILKIEPNEEVKKGLWKTHEVLNHGIAYYMNILKLIRQEAIYEHHEQDPKNP | SEQ ID |
| B. hisashii | KKVSKAEIQAELWDFVLKMQKCNSFTHEVDKDEVFNILRELYEELVPSSVEKKGEAN | NO: 110 |
| 1108 AA | QLSNKFLYPLVDPNSQSGKGTASSGRKPRWYNLKIAGDPSWEEEKKKWEEDKKKDPL | |
| 130.4 kDa | AKILGKLAEYGLIPLFIPYTDSNEPIVKEIKWMEKSRNQSVRRLDKDMFIQALERFL | |
| | SWESWNLKVKEEYEKVEKEYKTLEERIKEDIQALKALEQYEKERQEQLLRDTLNTNE | |
| | YRLSKRGLRGWREIIQKWLKMDENEPSEKYLEVFKDYQRKHPREAGDYSVYEFLSKK | |
| | ENHFIWRNHPEYPYLYATFCEIDKKKKDAKQQATFTLADPINHPLWVRFEERSGSNL | |
| | NKYRILTEQLHTEKLKKKLTVQLDRLIYPTESGGWEEKGKVDIVLLPSRQFYNQIFL | |
| | DIEEKGKHAFTYKDESIKFPLKGTLGGARVQFDRDHLRRYPHKVESGNVGRIYFNMT | |
| | VNIEPTESPVSKSLKIHRDDFPKVVNFKPKELTEWIKDSKGKKLKSGIESLEIGLRV | |
| | MSIDLGQRQAAAASIFEVVDQKPDIEGKLFFPIKGTELYAVHRASFNIKLPGETLVK | |
| | SREVLRKAREDNLKLMNQKLNFLRNVLHFQQFEDITEREKRVTKWISRQENSDVPLV | |
| | YQDELIQIRELMYKPYKDWVAFLKQLHKRLEVEIGKEVKHWRKSLSDGRKGLYGISL | |
| | KNIDEIDRTRKFLLRWSLRPTEPGEVRRLEPGQRFAIDQLNHLNALKEDRLKKMANT | |
| | IIMHALGYCYDVRKKKWQAKNPACQIILFEDLSNYNPYEERSRFENSKLMKWSRREI | |
| | PRQVALQGEIYGLQVGEVGAQFSSRFHAKTGSPGIRCSVVTKEKLQDNRFFKNLQRE | |
| | GRLTLDKIAVLKEGDLYPDKGGEKFISLSKDRKCVTTHADINAAQNLQKRFWTRTHG | |
| | FYKVYCKAYQVDGQTVYIPESKDQKQKIIEEFGEGYFILKDGVYEWVNAGKLKIKKG | |
| | SSKQSSSELVDSDILKDSFDLASELKGEKLMLYRDPSGNVFPSDKWMAAGVFFGKLE | |
| | RILISKLTNQYSISTIEDDSSKQSM | |

[0163] Additional exemplary Cas9 equivalent protein sequences can include the following:

| Description | Sequence |
|---|---|
| AsCas12a | MTQFEGFTNLYQVSKTLRFELIPQGKTLKHIQEQGFIEEDKARNDHYKELKPIIDRIYKTYADQCLQLVQ |
| (previously | LDWENLSAAIDSYRKEKTEETRNALIEEQATYRNAIHDYFIGRTDNLTDAINKRHAEIYKGLFKAELFNG |
| known as Cpf1) | KVLKQLGTVTTTEHENALLRSFDKFTTYFSGFYENRKNVFSAEDISTAIPHRIVQDNFPKFKENCHIFTR |
| Acidaminococcus sp. | LITAVPSLREHFENVKKAIGIFVSTSIEEVFSFPFYNQLLTQTQIDLYNQLLGGISREAGTEKIKGLNEV |
| (strain BV3L6) | LNLAIQKNDETAHIIASLPHRFIPLFKQILSDRNTLSFILEEFKSDEEVIQSFCKYKTLLRNENVLETAE |
| UniProtKB | ALFNELNSIDLTHIFISHKKLETISSALCDHWDTLRNALYERRISELTGKITKSAKEKVQRSLKHEDINL |
| U2UMQ6 | QEIISAAGKELSEAFKQKTSEILSHAHAALDQPLPTTLKKQEEKEILKSQLDSLLGLYHLLDWFAVDESN |
| | EVDPEFSARLTGIKLEMEPSLSFYNKARNYATKKPYSVEKFKLNFQMPTLASGWDVNKEKNNGAILFVKN |
| | GLYYLGIMPKQKGRYKALSFEPTEKTSEGFDKMYYDYFPDAAKMIPKCSTQLKAVTAHFQTHTTPILLSN |
| | NFIEPLEITKEIYDLNNPEKEPKKFQTAYAKKTGDQKGYREALCKWIDFTRDFLSKYTKTTSIDLSSLRP |
| | SSQYKDLGEYYAELNPLLYHISFQRIAEKEIMDAVETGKLYLFQIYNKDFAKGHHGKPNLHTLYWTGLFS |
| | PENLAKTSIKLNGQAELFYRPKSRMKRMAHRLGEKMLNKKLKDQKTPIPDTLYQELYDYVNHRLSHDLSD |
| | EARALLPNVITKEVSHEIIKDRRFTSDKFFFHVPITLNYQAANSPSKFNQRVNAYLKEHPETPIIGIDRG |
| | ERNLIYITVIDSTGKILEQRSLNTIQQFDYQKKLDNREKERVAARQAWSVVGTIKDLKQGYLSQVIHEIV |
| | DLMIHYQAVVVLENLNFGFKSKRTGIAEKAVYQQFEKMLIDKLNCLVLKDYPAEKVGGVLNPYQLTDQFT |
| | SFAKMGTQSGFLFYVPAPYTSKIDPLTGFVDPFVWKTIKNHESRKHFLEGFDFLHYDVKTGDFILHFKMN |
| | RNLSFQRGLPGFMPAWDIVFEKNETQFDAKGTPFIAGKRIVPVIENHRFTGRYRDLYPANELIALLEEKG |
| | IVFROGSNILPKLLENDDSHAIDTMVALIRSVLQMRNSNAATGEDYINSPVRDLNGVCFDSRFQNPEWPM |
| | DADANGAYHIALKGQLLLNHLKESKDLKLQNGISNQDWLAYIQELRN (SEQ ID NO: 111) |
| AsCas12a nickase | MTQFEGFTNLYQVSKTLRFELIPQGKTLKHIQEQGFIEEDKARNDHYKELKPIIDRIYKTYADQCLQLVQ |
| (e.g., R1226A) | LDWENLSAAIDSYRKEKTEETRNALIEEQATYRNAIHDYFIGRTDNLTDAINKRHAEIYKGLFKAELFNG |
| | KVLKQLGTVTTTEHENALLRSFDKFTTYFSGFYENRKNVFSAEDISTAIPHRIVQDNFPKFKENCHIFTR |
| | LITAVPSLREHFENVKKAIGIFVSTSIEEVFSFPFYNQLLTQTQIDLYNQLLGGISREAGTEKIKGLNEV |
| | LNLAIQKNDETAHIIASLPHRFIPLFKQILSDRNTLSFILEEFKSDEEVIQSFCKYKTLLRNENVLETAE |
| | ALFNELNSIDLTHIFISHKKLETISSALCDHWDTLRNALYERRISELTGKITKSAKEKVQRSLKHEDINL |
| | QEIISAAGKELSEAFKQKTSEILSHAHAALDQPLPTTLKKQEEKEILKSQLDSLLGLYHLLDWFAVDESN |
| | EVDPEFSARLTGIKLEMEPSLSFYNKARNYATKKPYSVEKFKLNFQMPTLASGWDVNKEKNNGAILFVKN |
| | GLYYLGIMPKQKGRYKALSFEPTEKTSEGFDKMYYDYFPDAAKMIPKCSTQLKAVTAHFQTHTTPILLSN |
| | NFIEPLEITKEIYDLNNPEKEPKKFQTAYAKKTGDQKGYREALCKWIDFTRDFLSKYTKTTSIDLSSLRP |
| | SSQYKDLGEYYAELNPLLYHISFQRIAEKEIMDAVETGKLYLFQIYNKDFAKGHHGKPNLHTLYWTGLFS |
| | PENLAKTSIKLNGQAELFYRPKSRMKRMAHRLGEKMLNKKLKDQKTPIPDTLYQELYDYVNHRLSHDLSD |
| | EARALLPNVITKEVSHEIIKDRRFTSDKFFFHVPITLNYQAANSPSKFNQRVNAYLKEHPETPIIGIDRG |
| | ERNLIYITVIDSTGKILEQRSLNTIQQFDYQKKLDNREKERVAARQAWSVVGTIKDLKQGYLSQVIHEIV |
| | DLMIHYQAVVVLENLNFGFKSKRTGIAEKAVYQQFEKMLIDKLNCLVLKDYPAEKVGGVLNPYQLTDQFT |
| | SFAKMGTQSGFLFYVPAPYTSKIDPLTGFVDPFVWKTIKNHESRKHFLEGFDFLHYDVKTGDFILHFKMN |
| | RNLSFQRGLPGFMPAWDIVFEKNETQFDAKGTPFIAGKRIVPVIENHRFTGRYRDLYPANELIALLEEKG |
| | IVFROGSNILPKLLENDDSHAIDTMVALIRSVLQMANSNAATGEDYINSPVRDLNGVCFDSRFQNPEWPM |
| | DADANGAYHIALKGQLLLNHLKESKDLKLQNGISNQDWLAYIQELRN (SEQ ID NO: 112) |
| LbCas12a | 1 MNYKTGLEDF IGKESLSKTL RNALIPTEST KIHMEEMGVI RDDELRAEKQ QELKEIMDDY |
| (previously | 61 YRTFIEEKLG QIQGIQWNSL FQKMEETMED ISVRKDLDKI QNEKRKEICC YFTSDKRFKD |
| known as Cpf1) | 121 LFNAKLITDI LPNFIKDNKE YTEEEKAEKE QTRVLFQRFA TAFTNYFNQR RNNFSEDNIS |
| Lachnispiraceae | 181 TAISFRIVNE NSEIHLQNMR AFQRIEQQYP EEVCGMEEEY KDMLQEWQMK HIYSVDFYDR |
| bacterium | 241 ELTQPGIEYY NGICGKINEH MNQFCQKNRI NKNDFRMKKL HKQILCKKSS YYEIPFRFES |
| GAM79 | 301 DQEVYDALNE FIKTMKKKEI IRRCVHLGQE CDDYDLGKIY ISSNKYEQIS NALYGSWDTI |
| Ref Seq. | 361 RKCIKEEYMD ALPGKGEKKE EKAEAAAKKE EYRSIADIDK IISLYGSEMD RTISAKKCIT |
| WP_119623382.1 | 421 EICDMAGQIS IDPLVCNSDI KLLQNKEKTT EIKTILDSFL HVYQWGQTFI VSDIIEKDSY |
| | 481 FYSELEDVLE DFEGITTLYN HVRSYVTQKP YSTVKFKLHF GSPTLANGWS QSKEYDNNAI |
| | 541 LLMRDQKFYL GIFNVRNKPD KQIIKGHEKE EKGDYKKMIY NLLPGPSKML PKVFITSRSG |
| | 601 QETYKPSKHI LDGYNEKRHI KSSPKFDLGY CWDLIDYYKE CIHKHPDWKN YDFHFSDTKD |
| | 661 YEDISGFYRE VEMQGYQIKW TYISADEIQK LDEKGQIFLF QIYNKDFSVH STGKDNLHTM |
| | 721 YLKNLFSEEN LKDIVLKLNG EAELFFRKAS IKTPIVHKKG SVLVNRSYTQ TVGNKEIRVS |
| | 781 IPEEYYTEIY NYLNHIGKGK LSSEAQRYLD EGKIKSFTAT KDIVKNYRYC CDHYFLHLPI |
| | 841 TINFKAKSDV AVNERTLAYI AKKEDIHIIG IDRGERNLLY ISVVDVHGNI REQRSFNIVN |
| | 901 GYDYQQKLKD REKSRDAARK NWEEIEKIKE LKEGYLSMVI HYIAQLVVKY NAVVAMEDLN |
| | 961 YGFKTGRFKV ERQVYQKFET MLIEKLHYLV FKDREVCEEG GVLRGYQLTY IPESLKKVGK |
| | 1021 QCGFIFYVPA GYTSKIDPTT GFVNLFSFKN LTNRESRQDF VGKFDEIRYD RDKKMFEFSF |
| | 1081 DYNNYIKKGT ILASTKWKVY TNGTRLKRIV VNGKYTSQSM EVELTDAMEK MLQRAGIEYH |
| | 1141 DGKDLKGQIV EKGIEAEIID IFRLTVQMRN SRSESEDREY DRLISPVLND KGEFFDTATA |
| | 1201 DKTLPQDADA NGAYCIALKG LYEVKQIKEN WKENEQFPRN KLVQDNKTWF DFMQKKRYL |
| | (SEQ ID NO: 113) |
| PcCas12a- | 1 MAKNFEDFKR LYSLSKTLRF EAKPIGATLD NIVKSGLLDE DEHRAASYVK VKKLIDEYHK |
| previously known at | 61 VFIDRVLDDG CLPLENKGNN NSLAEYYESY VSRAQDEDAK KKFKEIQQNL RSVIAKKLTE |
| Cpf1 | 121 DKAYANLFGN KLIESYKDKE DKKKIIDSDL IQFINTAEST QLDSMSQDEA KELVKEFWGF |
| Prevotella copri | 181 VTYFYGFFDN RKNMYTAEEK STGIAYRLVN ENLPKFIDNI EAFNRAITRP EIQENMGVLY |
| Ref Seq. | 241 SDFSEYLNVE SIQEMFQLDY YNMLLTQKQI DVYNAIIGGK TDDEHDVKIK GINEYINLYN |
| WP_119227726.1 | 301 QQHKDDKLPK LKALFKQILS DRNAISWLPE EFNSDQEVLN AIKDCYERLA ENVLGDKVLK |
| | 361 SLLGSLADYS LDGIFIRNDL QLTDISQKMF GNWGVIQNAI MQNIKRVAPA RKHKESEEDY |
| | 421 EKRIAGIFKK ADSFSISYIN DCLNEADPNN AYFVENYFAT FGAVNTPTMQ RENLFALVQN |
| | 481 AYTEVAALLH SDYPTVKHLA QDKANVSKIK ALLDAIKSLQ HFVKPLLGKG DESDKDERFY |
| | 541 GELASLWAEL DTVTPLYNMI RNYMTRKPYS QKKIKLNFEN PQLLGGWDAN KEKDYATIIL |
| | 601 RRNGLYYLAI MDKDSRKLLG KAMPSDGECY EKMVYKFFKD VTTMIPKCST QLKDVQAYFK |
| | 661 VNTDDYVLNS KAFNKPLTIT KEVFDLNNVL YGKYKKFQKG YLTATGDNVG YTHAVNVWIK |
| | 721 FCMDFLNSYD STCIYDFSSL KPESYLSLDA FYQDANLLLY KLSFARASVS YINQLVEEGK |
| | 781 MYLFQIYNKD FSEYSKGTPN MHTLYWKALF DERNLADVVY KLNGQAEMFY RKKSIENTHP |
| | 841 THPANHPILN KNKDNKKKES LFDYDLIKDR RYTVDKFMFH VPITMNFKSV GSENINQDVK |
| | 901 AYLRHADDMH IIGIDRGERH LLYLVVIDLQ GNIKEQYSLN EIVNEYNGNT YHTNYHDLLD |
| | 961 VREEERLKAR QSWQTIENIK ELKEGYLSQV IHKITQLMVR YHAIVVLEDL SKGFMRSRQK |
| | 1021 VEKQVYQKFE KMLIDKLNYL VDKKTDVSTP GGLLNAYQLT CKSDSSQKLG KQSGFLFYIP |
| | 1081 AWNTSKIDPV TGFVNLLDTH SLNSKEKIKA FFSKFDAIRY NKDKKWFEFN LDYDKFGKKA |
| | 1141 EDTRTKWTLC TRGMRIDTFR NKEKNSQWDN QEVDLTTEMK SLLEHYYIDI HGNLKDAISA |
| | 1201 QTDKAFFTGL LHILKLTLQM RNSITGTETD YLVSPVADEN GIFYDSRSCG NQLPENADAN |
| | 1261 GAYNIARKGL MLIEQIKNAE DLNNVKFDIS NKAWLNFAQQ KPYKNG |
| | (SEQ ID NO: 114) |
| ErCas12a- | 1 MFSAKLISDI LPEFVIHNNN YSASEKEEKT QVIKLFSRFA TSFKDYFKNR ANCFSANDIS |
| previously known at | 61 SSSCHRIVND NAEIFFSNAL VYRRIVKNLS NDDINKISGD MKDSLKEMSL EEIYSYEKYG |
| Cpf1 | 121 EFITQEGISF YNDICGKVNL FMNLYCQKNK ENKNLYKLRK LHKQILCIAD TSYEVPYKFE |
| Eubacterium rectale | 181 SDEEVYQSVN GFLDNISSKH IVERLRKIGE NYNGYNLDKI YIVSKFYESV SQKTYRDWET |
| Ref Seq. | 241 INTALEIHYN NILPGNGKSK ADKVKKAVKN DLQKSITEIN ELVSNYKLCP DDNIKAETYI |
| WP_119223642.1 | 301 HEISHILNNF EAQELKYNPE IHLVESELKA SELKNVLDVI MNAFHWCSVF MTEELVDKDN |
| | 361 NFYAELEEIY DEIYPVISLY NLVRNYVTQK PYSTKKIKLN FGIPTLADGW SKSKEYSNNA |
| | 421 IILMRDNLYY LGIFNAKNKP DKKIIEGNTS ENKGDYKKMI YNLLPGPNKM IPKVFLSSKT |
| | 481 GVETYKPSAY ILEGYKQNKH LKSSKDFDIT FCHDLIDYFK NCIAIHPEWK NFGFDFSDTS |
| | 541 TYEDISGFYR EVELQGYKID WTYISEKDID LLQEKGQLYL FQIYNKDFSK KSSGNDNLHT |
| | 601 MYLKNLFSEE NLKDIVLKLN GEAEIFFRKS SIKNPIIHKK GSILVNRTYE AEEKDQFGNI |
| | 661 QIVRKTIPEN IYQELYKYFN DKSDKELSDE AAKLKNVVGH HEAATNIVKD YRYTYDKYFL |
| | 721 HMPITINFKA NKTSFINDRI LQYIAKEKDL HVIGIDRGER NLIYVSVIDT CGNIVEQKSF |
| | 781 NIVNGYDYQI KLKQQEGARQ IARKEWKEIG KIKEIKEGYL SLVIHEISKM VIKYNAIIAM |
| | 841 EDLSYGFKKG RFKVERQVYQ KFETMLINKL NYLVFKDISI TENGGLLKGY QLTYIPDKLK |
| | 901 NVGHQCGCIF YVPAAYTSKI DPTTGFVNIF KFKDLTVDAK REFIKKFDSI RYDSDKNLFC |
| | 961 FTFDYNNFIT QNTVMSKSSW SVYTYGVRIK RRFVNGRFSN ESDTIDITKD MEKTLEMTDI |
| | 1021 NWRDGHDLRQ DIIDYEIVQH IFEIFKLTVQ MRNSLSELED RDYDRLISPV LNENNIFYDS |
| | 1081 AKAGDALPKD ADANGAYCIA LKGLYEIKQI TENWKEDGKF SRDKLKISNK DWFDFIQNKR |
| | 1141 YL (SEQ ID NO: 115) |
| CsCas12a- | 1 MNYKTGLEDF IGKESLSKTL RNALIPTEST KIHMEEMGVI RDDELRAEKQ QELKEIMDDY |
| previously known at | 61 YRAFIEEKLG QIQGIQWNSL FQKMEETMED ISVRKDLDKI QNEKRKEICC YFTSDKRFKD |
| Cpf1 | 121 LFNAKLITDI LPNFIKDNKE YTEEEKAEKE QTRVLFQRFA TAFTNYFNQR RNNFSEDNIS |
| Colstridium sp. | 181 TAISFRIVNE NSEIHLQNMR AFQRIEQQYP EEVCGMEEEY KDMLQEWQMK HIYLVDFYDR |
| AF34-10BH | 241 VLTQPGIEYY NGICGKINEH MNQFCQKNRI NKNDFRMKKL HKQILCKKSS YYEIPFRFES |
| Ref Seq. | 301 DQEVYDALNE FIKTMKEKEI ICRCVHLGQK CDDYDLGKIY ISSNKYEQIS NALYGSWDTI |
| WP_118538418.1 | 361 RKCIKEEYMD ALPGKGEKKE EKAEAAAKKE EYRSIADIDK IISLYGSEMD RTISAKKCIT |
| | 421 EICDMAGQIS TDPLVCNSDI KLLQNKEKTT EIKTILDSFL HVYQWGQTFI VSDIIEKDSY |
| | 481 FYSELEDVLE DFEGITTLYN HVRSYVTQKP YSTVKFKLHF GSPTLANGWS QSKEYDNNAI |
| | 541 LLMRDQKFYL GIFNVRNKPD KQIIKGHEKE EKGDYKKMIY NLLPGPSKML PKVFITSRSG |
| | 601 QETYKPSKHI LDGYNEKRHI KSSPKFDLGY CWDLIDYYKE CIHKHPDWKN YDFHFSDTKD |
| | 661 YEDISGFYRE VEMQGYQIKW TYISADEIQK LDEKGQIFLF QIYNKDFSVH STGKDNLHTM |
| | 721 YLKNLFSEEN LKDIVLKLNG EAELFFRKAS IKTPVVHKKG SVLVNRSYTQ TVGDKEIRVS |
| | 781 IPEEYYTEIY NYLNHIGRGK LSTEAQRYLE ERKIKSFTAT KDIVKNYRYC CDHYFLHLPI |
| | 841 TINFKAKSDI AVNERTLAYI AKKEDIHIIG IDRGERNLLY ISVVDVHGNI REQRSFNIVN |
| | 901 GYDYQQKLKD REKSRDAARK NWEEIEKIKE LKEGYLSMVI HYIAQLVVKY NAVVAMEDLN |
| | 961 YGFKTGRFKV ERQVYQKFET MLIEKLHYLV FKDREVCEEG GVLRGYQLTY IPESLKKVGK |
| | 1021 QCGFIFYVPA GYTSKIDPTT GFVNLFSFKN LTNRESRQDF VGKFDEIRYD RDKKMFEFSF |
| | 1081 DYNNYIKKGT MLASTKWKVY TNGTRLKRIV VNGKYTSQSM EVELTDAMEK MLQRAGIEYH |
| | 1141 DGKDLKGQIV EKGIEAEIID IFRLTVQMRN SRSESEDREY DRLISPVLND KGEFFDTATA |
| | 1201 DKTLPQDADA NGAYCIALKG LYEVKQIKEN WKENEQFPRN KLVQDNKTWF DFMQKKRYL |
| | (SEQ ID NO: 116) |
| BhCas12b | 1 MATRSFILKI EPNEEVKKGL WKTHEVLNHG IAYYMNILKL IRQEAIYEHH EQDPKNPKKV |
| Bacillus hisashii | 61 SKAEIQAELW DFVLKMQKCN SFTHEVDKDE VFNILRELYE ELVPSSVEKK GEANQLSNKF |
| Ref Seq. | 121 LYPLVDPNSQ SGKGTASSGR KPRWYNLKIA GDPSWEEEKK KWEEDKKKDP LAKILGKLAE |
| WP_095142515.1 | 181 YGLIPLFIPY TDSNEPIVKE IKWMEKSRNQ SVRRLDKDMF IQALERFLSW ESWNLKVKEE |
| | 241 YEKVEKEYKT LEERIKEDIQ ALKALEQYEK ERQEQLLRDT LNTNEYRLSK RGLRGWREII |
| | 301 QKWLKMDENE PSEKYLEVFK DYQRKHPREA GDYSVYEFLS KKENHFIWRN HPEYPYLYAT |
| | 361 FCEIDKKKKD AKQQATFTLA DPINHPLWVR FEERSGSNLN KYRILTEQLH TEKLKKKLTV |
| | 421 QLDRLIYPTE SGGWEEKGKV DIVLLPSRQF YNQIFLDIEE KGKHAFTYKD ESIKFPLKGT |
| | 481 LGGARVQFDR DHLRRYPHKV ESGNVGRIYF NMTVNIEPTE SPVSKSLKIH RDDFPKVVNF |
| | 541 KPKELTEWIK DSKGKKLKSG IESLEIGLRV MSIDLGQRQA AAASIFEVVD QKPDIEGKLF |
| | 601 FPIKGTELYA VHRASFNIKL PGETLVKSRE VLRKAREDNL KLMNQKLNFL RNVLHFQQFE |
| | 661 DITEREKRVT KWISRQENSD VPLVYQDELI QIRELMYKPY KDWVAFLKQL HKRLEVEIGK |
| | 721 EVKHWRKSLS DGRKGLYGIS LKNIDEIDRT RKFLLRWSLR PTEPGEVRRL EPGQRFAIDQ |
| | 781 LNHLNALKED RLKKMANTII MHALGYCYDV RKKKWQAKNP ACQIILFEDL SNYNPYEERS |
| | 841 RFENSKLMKW SRREIPRQVA LQGEIYGLQV GEVGAQFSSR FHAKTGSPGI RCSVVTKEKL |
| | 901 QDNRFFKNLQ REGRLTLDKI AVLKEGDLYP DKGGEKFISL SKDRKCVTTH ADINAAQNLQ |
| | 961 KRFWTRTHGF YKVYCKAYQV DGQTVYIPES KDQKQKIIEE FGEGYFILKD GVYEWVNAGK |
| | 1021 LKIKKGSSKQ SSSELVDSDI LKDSFDLASE LKGEKLMLYR DPSGNVFPSD KWMAAGVFFG |
| | 1081 KLERILISKL TNQYSISTIE DDSSKQSM (SEQ ID NO: 117) |
| ThCas12b | 1 MSEKTTQRAY TLRLNRASGE CAVCQNNSCD CWHDALWATH KAVNRGAKAF GDWLLTLRGG |
| Theromonas | 61 LCHTLVEMEV PAKGNNPPQR PTDQERRDRR VLLALSWLSV EDEHGAPKEF IVATGRDSAD |
| hydrothermalis | 121 DRAKKVEEKL REILEKRDFQ EHEIDAWLQD CGPSLKAHIR EDAVWVNRRA LFDAAVERIK |
| Ref Seq. | 181 TLTWEEAWDF LEPFFGTQYF AGIGDGKDKD DAEGPARQGE KAKDLVQKAG QWLSARFGIG |
| WP_072754838 | 241 TGADFMSMAE AYEKIAKWAS QAQNGDNGKA TIEKLACALR PSEPPTLDTV LKCISGPGHK |
| | 301 SATREYLKTL DKKSTVTQED LNQLRKLADE DARNCRKKVG KKGKKPWADE VLKDVENSCE |
| | 361 LTYLQDNSPA RHREFSVMLD HAARRVSMAH SWIKKAEQRR RQFESDAQKL KNLQERAPSA |
| | 421 VEWLDRFCES RSMTTGANTG SGYRIRKRAI EGWSYVVQAW AEASCDTEDK RIAAARKVQA |
| | 481 DPEIEKFGDI QLFEALAADE AICVWRDQEG TQNPSILIDY VTGKTAEHNQ KRFKVPAYRH |
| | 541 PDELRHPVFC DFGNSRWSIQ FAIHKEIRDR DKGAKQDTRQ LQNRHGLKMR LWNGRSMTDV |
| | 601 NLHWSSKRLT ADLALDQNPN PNPTEVTRAD RLGRAASSAF DHVKIKNVFN EKEWNGRLQA |
| | 661 PRAELDRIAK LEEQGKTEQA EKLRKRLRWY VSFSPCLSPS GPFIVYAGQH NIQPKRSGQY |
| | 721 APHAQANKGR ARLAQLILSR LPDLRILSVD LGHRFAAACA VWETLSSDAF RREIQGLNVL |
| | 781 AGGSGEGDLF LHVEMTGDDG KRRTVVYRRI GPDQLLDNTP HPAPWARLDR QFLIKLQGED |
| | 841 EGVREASNEE LWTVHKLEVE VGRTVPLIDR MVRSGFGKTE KQKERLKKLR ELGWISAMPN |
| | 901 EPSAETDEKE GEIRSISRSV DELMSSALGT LRLALKRHGN RARIAFAMTA DYKPMPGGQK |
| | 961 YYFHEAKEAS KNDDETKRRD NQIEFLQDAL SLWHDLFSSP DWEDNEAKKL WQNHIATLPN |
| | 1021 YQTPEEISAE LKRVERNKKR KENRDKLRTA AKALAENDQL RQHLHDTWKE RWESDDQQWK |
| | 1081 ERLRSLKDWI FPRGKAEDNP SIRHVGGLSI TRINTISGLY QILKAFKMRP EPDDLRKNIP |
| | 1141 QKGDDELENF NRRLLEARDR LREQRVKQLA SRIIEAALGV GRIKIPKNGK LPKRPRTTVD |
| | 1201 TPCHAVVIES LKTYRPDDLR TRRENRQLMQ WSSAKVRKYL KEGCELYGLH FLEVPANYTS |
| | 1261 RQCSRTGLPG IRCDDVPTGD FLKAPWWRRA INTAREKNGG DAKDRFLVDL YDHLNNLQSK |
| | 1321 GEALPATVRV PRQGGNLFIA GAQLDDTNKE RRAIQADLNA AANIGLRALL DPDWRGRWWY |
| | 1381 VPCKDGTSEP ALDRIEGSTA FNDVRSLPTG DNSSRRAPRE IENLWRDPSG DSLESGTWSP |
| | 1441 TRAYWDTVQS RVIELLRRHA GLPTS (SEQ ID NO: 118) |
| LsCas12b | 1 MSIRSFKLKL KTKSGVNAEQ LRRGLWRTHQ LINDGIAYYM NWLVLLRQED LFIRNKETNE |
| Laceyella sacchari | 61 IEKRSKEEIQ AVLLERVHKQ QQRNQWSGEV DEQTLLQALR QLYEEIVPSV IGKSGNASLK |
| WP_132221894.1 | 121 ARFFLGPLVD PNNKTTKDVS KSGPTPKWKK MKDAGDPNWV QEYEKYMAER QTLVRLEEMG |
| | 181 LIPLFPMYTD EVGDIHWLPQ ASGYTRTWDR DMFQQAIERL LSWESWNRRV RERRAQFEKK |
| | 241 THDFASRFSE SDVQWMNKLR EYEAQQEKSL EENAFAPNEP YALTKKALRG WERVYHSWMR |
| | 301 LDSAASEEAY WQEVATCQTA MRGEFGDPAI YQFLAQKENH DIWRGYPERV IDFAELNHLQ |
| | 361 RELRRAKEDA TFTLPDSVDH PLWVRYEAPG GTNIHGYDLV QDTKRNLTLI LDKFILPDEN |
| | 421 GSWHEVKKVP FSLAKSKQFH RQVWLQEEQK QKKREVVFYD YSTNLPHLGT LAGAKLQWDR |
| | 481 NFLNKRTQQQ IEETGEIGKV FFNISVDVRP AVEVKNGRLQ NGLGKALTVL THPDGTKIVT |
| | 541 GWKAEQLEKW VGESGRVSSL GLDSLSEGLR VMSIDLGQRT SATVSVFEIT KEAPDNPYKF |
| | 601 FYQLEGTEMF AVHQRSFLLA LPGENPPQKI KQMREIRWKE RNRIKQQVDQ LSAILRLHKK |
| | 661 VNEDERIQAI DKLLQKVASW QLNEEIATAW NQALSQLYSK AKENDLQWNQ AIKNAHHQLE |
| | 721 PVVGKQISLW RKDLSTGRQG IAGLSLWSIE ELEATKKLLT RWSKRSREPG VVKRIERFET |
| | 781 FAKQIQHHIN QVKENRLKQL ANLIVMTALG YKYDQEQKKW IEVYPACQVV LFENLRSYRF |
| | 841 SFERSRRENK KLMEWSHRSI PKLVQMQGEL FGLQVADVYA AYSSRYHGRT GAPGIRCHAL |
| | 901 TEADLRNETN IIHELIEAGF IKEEHRPYLQ QGDLVPWSGG ELFATLQKPY DNPRILTLHA |
| | 961 DINAAQNIQK RFWHPSMWFR VNCESVMEGE IVTYVPKNKT VHKKQGKTFR FVKVEGSDVY |
| | 1021 EWAKWSKNRN KNTFSSITER KPPSSMILFR DPSGTFFKEQ EWVEQKTFWG KVQSMIQAYM |
| | 1081 KKTIVQRMEE (SEQ ID NO: 119) |
| DtCas12b | 1 MVLGRKDDTA ELRRALWTTH EHVNLAVAEV ERVLLRCRGR SYWTLDRRGD PVHVPESQVA |
| Dsulfonatronum | 61 EDALAMAREA QRRNGWPVVG EDEEILLALR YLYEQIVPSC LLDDLGKPLK GDAQKIGTNY |
| thiodismutans | 121 AGPLFDSDTC RRDEGKDVAC CGPFHEVAGK YLGALPEWAT PISKQEFDGK DASHLRFKAT |
| WP_031386437 | 181 GGDDAFFRVS IEKANAWYED PANQDALKNK AYNKDDWKKE KDKGISSWAV KYIQKQLQLG |
| | 241 QDPRTEVRRK LWLELGLLPL FIPVFDKTMV GNLWNRLAVR LALAHLLSWE SWNHRAVQDQ |
| | 301 ALARAKRDEL AALFLGMEDG FAGLREYELR RNESIKQHAF EPVDRPYVVS GRALRSWTRV |
| | 361 REEWLRHGDT QESRKNICNR LQDRLRGKFG DPDVFHWLAE DGQEALWKER DCVTSFSLLN |
| | 421 DADGLLEKRK GYALMTFADA RLHPRWAMYE APGGSNLRTY QIRKTENGLW ADVVLLSPRN |
| | 481 ESAAVEEKTF NVRLAPSGQL SNVSFDQIQK GSKMVGRCRY QSANQQFEGL LGGAEILFDR |
| | 541 KRIANEQHGA TDLASKPGHV WFKLTLDVRP QAPQGWLDGK GRPALPPEAK HFKTALSNKS |
| | 601 KFADQVRPGL RVLSVDLGVR SFAACSVFEL VRGGPDQGTY FPAADGRTVD DPEKLWAKHE |
| | 661 RSFKITLPGE NPSRKEEIAR RAAMEELRSL NGDIRRLKAI LRLSVLQEDD PRTEHLRLFM |
| | 721 EAIVDDPAKS ALNAELFKGF GDDRFRSTPD LWKQHCHFFH DKAEKVVAER FSRWRTETRP |
| | 781 KSSSWQDWRE RRGYAGGKSY WAVTYLEAVR GLILRWNMRG RTYGEVNRQD KKQFGTVASA |
| | 841 LLHHINQLKE DRIKTGADMI IQAARGFVPR KNGAGWVQVH EPCRLILFED LARYRFRTDR |
| | 901 SRRENSRLMR WSHREIVNEV GMQGELYGLH VDTTEAGFSS RYLASSGAPG VRCRHLVEED |
| | 961 FHDGLPGMHL VGELDWLLPK DKDRTANEAR RLLGGMVRPG MLVPWDGGEL FATLNAASQL |
| | 1021 HVIHADINAA QNLQRRFWGR CGEAIRIVCN QLSVDGSTRY EMAKAPKARL LGALQQLKNG |
| | 1081 DAPFHLTSIP NSQKPENSYV MTPTNAGKKY RAGPGEKSSG EEDELALDIV EQAEELAQGR |
| | 1141 KTFFRDPSGV FFAPDRWLPS EIYWSRIRRR IWQVTLERNS SGRQERAEMD EMPY |
| | (SEQ ID NO: 120) |

[0164] napDNAbps that Recognize Non-Canonical PAM Sequences

[0165] In some embodiments, the napDNAbp is a nucleic acid programmable DNA binding protein that does not require a canonical (NGG) PAM sequence. In some embodiments, the napDNAbp is an argonaute protein. One example of such a nucleic acid programmable DNA binding protein is an Argonaute protein from Natronobacterium gregoryi (NgAgo). NgAgo is a ssDNA-guided endonuclease. NgAgo binds 5′ phosphorylated ssDNA of ˜24 nucleotides (gDNA) to guide it to its target site and will make DNA double-strand breaks at the gDNA site. In contrast to Cas9, the NgAgo—gDNA system does not require a protospacer-adjacent motif (PAM). Using a nuclease inactive NgAgo (dNgAgo) can greatly expand the bases that may be targeted. The characterization and use of NgAgo have been described in Gao et al., Nat Biotechnol., 2016 July; 34(7):768-73. PubMed PMID: 27136078; Swarts et al., Nature. 507(7491) (2014):258-61; and Swarts et al., Nucleic Acids Res. 43(10) (2015):5120-9, each of which is incorporated herein by reference.

[0166] In some embodiments, the disclosure provides napDNAbp domains that comprise SpCas9 variants that recognize and work best with NRRH, NRCH, and NRTH PAMs. See PCT Application No. PCT/US2019/47996, incorporated by reference herein. In some embodiments, the disclosed base editors comprise a napDNAbp domain selected from SpCas9-NRRH, SpCas9-NRTH, and SpCas9-NRCH.

[0167] In some embodiments, the disclosed base editors comprise a napDNAbp domain that has a sequence that is at least 90%, at least 95%, at least 98%, or at least 99% identical to SpCas9-NRRH. In some embodiments, the disclosed base editors comprise a napDNAbp domain that comprises SpCas9-NRRH. The SpCas9-NRRH has an amino acid sequence as presented in SEQ ID NO: 121 (underligned residues are mutated relative to SpCas9, as set forth in SEQ ID NO: 9)

(SEQ ID NO: 121)
MDKKYSIGLDIGTNSVGWAVITDEYKVPSKKFKVLGNTDRHSIKKNLIGA
LLFDSGETAEATRLKRTARRRYTRRKNRICYLQEIFSNEMAKVDDSFFHR
LEESFLVEEDKKHERHPIFGNIVDEVAYHEKYPTIYHLRKKLVDSTDKAD
LRLIYLALAHMIKFRGHFLIEGDLNPDNSDVDKLFIQLVQTYNQLFEENP
INASGVDAKAILSARLSKSRRLENLIAQLPGEKKNGLFGNLIALSLGLTP
NFKSNFDLAEDAKLQLSKDTYDDDLDNLLAQIGDQYADLFLAAKNLSDAI
LLSDILRVNTEITKAPLSASMVKRYDEHHQDLTLLKALVRQQLPEKYKEI
FFDQSKNGYAGYIDGGASQEEFYKFIKPILEKMDGTEELLVKLNREDLLR
KQRTFDNGIIPHQIHLGELHAILRRQGDFYPFLKDNREKIEKILTFRIPY
YVGPLARGNSRFAWMTRKSEETITPWNFEEVVDKGASAQSFIERMTNFDK
NLPNEKVLPKHSLLYEYFTVYNELTKVKYVTEGMRKPAFLSGEQKKAIVD
LLFKTNRKVTVKQLKEDYFKKIECFDSVEISGVEDRFNASLGTYHDLLKI
IKDKDFLDNEENEDILEDIVLTLTLFEDREMIEERLKTYAHLFDDKVMKQ
LKRLRYTGWGRLSRKLINGIRDKQSGKTILDFLKSDGFANRNFMQLIHDD
SLTFKEDIQKAQVSGQGDSLHEHIANLAGSPAIKKGILQTVKVVDELVKV
MGGHKPENIVIEMARENQTTQKGQKNSRERMKRIEEGIKELGSQILKEHP
VENTQLQNEKLYLYYLQNGRDMYVDQELDINRLSDYDVDHIVPQSFLKDD
SIDNKVLTRSDKNRGKSDNVPSEEVVKKMKNYWRQLLNAKLITQRKFDNL
TKAERGGLSELDKAGFIKRQLVETRQITKHVAQILDSRMNTKYDENDKLI
REVKVITLKSKLVSDFRKDFQFYKVREINNYHHAHDAYLNAVVGTALIKK
YPKLESEFVYGDYKVYDVRKMIAKSEQEIGKATAKYFFYSNIMNFFKTEI
TLANGEIRKRPLIETNGETGEIVWDKGRDFATVRKVLSMPQVNIVKKTEV
QTGGFSKESILPKGNSDKLIARKKDWDPKKYGGFNSPTAAYSVLVVAKVE
KGKSKKLKSVKELLGITIMERSSFEKNPIGFLEAKGYKEVKKDLIIKLPK
YSLFELENGRKRMLASAGVLHKGNELALPSKYVNFLYLASHYEKLKGSPE
DNEQKQLFVEQHKHYLDEIIEQISEFSKRVILADANLDKVLSAYNKHRDK
PIREQAENIIHLFTLTNLGVPAAFKYFDTTIDKKRYTSTKEVLDATLIHQ
SITGLYETRIDLSQLGGD.

[0168] In some embodiments, the disclosed base editors comprise a napDNAbp domain that has a sequence that is at least 90%, at least 95%, at least 98%, or at least 99% identical to SpCas9-NRCH. In some embodiments, the disclosed base editors comprise a napDNAbp domain that comprises SpCas9-NRCH. The SpCas9-NRCH has an amino acid sequence as presented in SEQ ID NO: 122 (underligned residues are mutated relative to SpCas9)

(SEQ ID NO: 122)
MDKKYSIGLDIGTNSVGWAVITDEYKVPSKKFKVLGNTDRHSIKKNLIGA
LLFDSGETAEATRLKRTARRRYTRRKNRICYLQEIFSNEMAKVDDSFFHR
LEESFLVEEDKKHERHPIFGNIVDEVAYHEKYPTIYHLRKKLVDSTDKAD
LRLIYLALAHMIKFRGHFLIEGDLNPDNSDVDKLFIQLVQTYNQLFEENP
INASGVDAKAILSARLSKSRRLENLIAQLPGEKKNGLFGNLIALSLGLTP
NFKSNFDLAEDAKLQLSKDTYDDDLDNLLAQIGDQYADLFLAAKNLSDAI
LLSDILRVNTEITKAPLSASMVKRYDEHHQDLTLLKALVRQQLPEKYKEI
FFDQSKNGYAGYIDGGASQEEFYKFIKPILEKMDGTEELLVKLNREDLLR
KQRTFDNGIIPHQIHLGELHAILRRQGDFYPFLKDNREKIEKILTFRIPY
YVGPLARGNSRFAWMTRKSEETITPWNFEEVVDKGASAQSFIERMTNFDK
NLPNEKVLPKHSLLYEYFTVYNELTKVKYVTEGMRKPAFLSGEQKKAIVD
LLFKTNRKVTVKQLKEDYFKKIECFDSVETSGVEDRFNASLGTYHDLLKI
IKDKDFLDNEENEDILEDIVLTLTLFEDREMIEERLKTYAHLFDDKVMKQ
LKRLRYTGWGRLSRKLINGIRDKQSGKTILDFLKSDGFANRNFMQLIHDD
SLTFKEDIQKAQVSGQGDSLHEHIANLAGSPAIKKGILQTVKVVDELVKV
MGGHKPENIVIEMARENQTTQKGQKNSRERMKRIEEGIKELGSQILKEHP
VENTQLQNEKLYLYYLQNGRDMYVDQELDINRLSDYDVDHIVPQSFLKDD
SIDNKVLTRSDKNRGKSDNVPSEEVVKKMKNYWRQLLNAKLITQRKFDNL
TKAERGGLSELDKAGFIKRQLVETRQITKHVAQILDSRMNTKYDENDKLI
REVKVITLKSKLVSDFRKDFQFYKVREINNYHHAHDAYLNAVVGTALIKK
YPKLESEFVYGDYKVYDVRKMIAKSEQEIGKATAKYFFYSNIMNFFKTEI
TLANGEIRKRPLIETNGETGEIVWDKGRDFATVRKVLSMPQVNIVKKTEV
QTGGFSKESILPKGNSDKLIARKKDWDPKKYGGFNSPTVAYSVLVVAKVE
KGKSKKLKSVKELLGITIMERSSFEKNPIDFLEAKGYKEVKKDLIIKLPK
YSLFELENGRKRMLASAGVLQKGNELALPSKYVNFLYLASHYEKLKGSPE
DNEQKQLFVEQHKHYLDEIIEQISEFSKRVILADANLDKVLSAYNKHRDK
PIREQAENIIHLFTLTNLGAPAAFKYFDTTINRKQYNTTKEVLDATLIRQ
SITGLYETRIDLSQLGGD

[0169] In some embodiments, the disclosed base editors comprise a napDNAbp domain that has a sequence that is at least 90%, at least 95%, at least 98%, or at least 99% identical to SpCas9-NRTH. In some embodiments, the disclosed base editors comprise a napDNAbp domain that comprises SpCas9-NRTH. The SpCas9-NRTH has an amino acid sequence as presented in SEQ ID NO: 123 (underligned residues are mutated relative to SpCas9)

(SEQ ID NO: 123)
MDKKYSIGLDIGTNSVGWAVITDEYKVPSKKFKVLGNTDRHSIKKNLIGA
LLFDSGETAEATRLKRTARRRYTRRKNRICYLQEIFSNEMAKVDDSFFHR
LEESFLVEEDKKHERHPIFGNIVDEVAYHEKYPTIYHLRKKLVDSTDKAD
LRLIYLALAHMIKFRGHFLIEGDLNPDNSDVDKLFIQLVQTYNQLFEENP
INASGVDAKAILSARLSKSRRLENLIAQLPGEKKNGLFGNLIALSLGLTP
NFKSNFDLAEDAKLQLSKDTYDDDLDNLLAQIGDQYADLFLAAKNLSDAI
LLSDILRVNTEITKAPLSASMVKRYDEHHQDLTLLKALVRQQLPEKYKEI
FFDQSKNGYAGYIDGGASQEEFYKFIKPILEKMDGTEELLVKLNREDLLR
KQRTFDNGIIPHQIHLGELHAILRRQGDFYPFLKDNREKIEKILTFRIPY
YVGPLARGNSRFAWMTRKSEETITPWNFEEVVDKGASAQSFIERMTNFDK
NLPNEKVLPKHSLLYEYFTVYNELTKVKYVTEGMRKPAFLSGEQKKAIVD
LLFKTNRKVTVKQLKEDYFKKIECFDSVEISGVEDRFNASLGTYHDLLKI
IKDKDFLDNEENEDILEDIVLTLTLFEDREMIEERLKTYAHLFDDKVMKQ
LKRLRYTGWGRLSRKLINGIRDKQSGKTILDFLKSDGFANRNFMQLIHDD
SLTFKEDIQKAQVSGQGDSLHEHIANLAGSPAIKKGILQTVKVVDELVKV
MGGHKPENIVIEMARENQTTQKGQKNSRERMKRIEEGIKELGSQILKEHP
VENTQLQNEKLYLYYLQNGRDMYVDQELDINRLSDYDVDHIVPQSFLKDD
SIDNKVLTRSDKNRGKSDNVPSEEVVKKMKNYWRQLLNAKLITQRKFDNL
TKAERGGLSELDKAGFIKRQLVETRQITKHVAQILDSRMNTKYDENDKLI
REVKVITLKSKLVSDFRKDFQFYKVREINNYHHAHDAYLNAVVGTALIKK
YPKLESEFVYGDYKVYDVRKMIAKSEQEIGKATAKYFFYSNIMNFFKTEI
TLANGEIRKRPLIETNGETGEIVWDKGRDFATVRKVLSMPQVNIVKKTEV
QTGGFSKESILPKGNSDKLIARKKDWDPKKYGGFNSPTVAYSVLVVAKVE
KGKSKKLKSVKELLGITIMERSSFEKNPIGFLEAKGYKEVKKDLIIKLPK
YSLFELENGRKRMLASASVLHKGNELALPSKYVNFLYLASHYEKLKGSSE
DNKQKQLFVEQHKHYLDEIIEQISEFSKRVILADANLDKVLSAYNKHRDK
PIREQAENIIHLFTLTNLGASAAFKYFDTTIGRKLYTSTKEVLDATLIHQ
SITGLYETRIDLSQLGGD

[0170] In other embodiments, the napDNAbp of any of the disclosed base editors comprises a Cas9 derived from a Streptococcus macacae, e.g. Streptococcus macacae NCTC 11558, or SmacCas9, or a variant thereof. In some embodiments, the napDNAbp comprises a hybrid variant of SmacCas9 that incorporates an SpCas9 domain with the SmacCas9 domain and is known as Spy-macCas9, or a variant thereof. In some embodiments, the napDNAbp comprises a hybrid variant of SmacCas9 that incorporates an increased nucleolytic variant of an SpCas9 (iSpy Cas9) domain and is known as iSpy-macCas9. Relative to Spymac-Cas9, iSpyMac-Cas9 contains two mutations, R221K and N394K, that were identified by deep mutational scans of Spy Cas9 that raise modification rates of the protein on most targets. See Jakimo et al., bioRxiv, A Cas9 with Complete PAM Recognition for Adenine Dinucleotides (Sep. 2018), herein incorporated by reference. Jakimo et al. showed that the hybrids Spy-macCas9 and iSpy-macCas9 recognize a short 5′-NAA-3′ PAM and recognized all evaluated adenine dinucleotide PAM sequences and possessed robust editing efficiency in human cells. Liu et al. engineered base editors containing Spy-mac Cas9, and demonstrated that cytidine and base editors containing Spymac domains can induce efficient C-to-T and A-to-G conversions in vivo. In addition, Liu et al. suggested that the PAM scope of Spy-mac Cas9 may be 5′-TAAA-3′, rather than 5′-NAA-3′ as reported by Jakimo et al. See Liu et al. Cell Discovery (2019) 5:58, herein incorporated by reference.

[0171] In some embodiments, the disclosed base editors comprise a napDNAbp domain that has a sequence that is at least 90%, at least 95%, at least 98%, or at least 99% identical to iSpyMac-Cas9. In some embodiments, the disclosed base editors comprise a napDNAbp domain that comprises iSpyMac-Cas9. The iSpyMac-Cas9 has an amino acid sequence as presented in SEQ ID NO: 124 (R221K and N394K mutations are underlined):

(SEQ ID NO: 124)
DKKYSIGLDIGTNSVGWAVITDEYKVPSKKFKVLGNTDRHSIKKNLIGAL
LFDSGETAEATRLKRTARRRYTRRKNRICYLQEIFSNEMAKVDDSFFHRL
EESFLVEEDKKHERHPIFGNIVDEVAYHEKYPTIYHLRKKLVDSTDKADL
RLIYLALAHMIKFRGHFLIEGDLNPDNSDVDKLFIQLVQTYNQLFEENPI
NASGVDAKAILSARLSKSRKLENLIAQLPGEKKNGLFGNLIALSLGLTPN
FKSNFDLAEDAKLQLSKDTYDDDLDNLLAQIGDQYADLFLAAKNLSDAIL
LSDILRVNTEITKAPLSASMIKRYDEHHQDLTLLKALVRQQLPEKYKEIF
FDQSKNGYAGYIDGGASQEEFYKFIKPILEKMDGTEELLVKLKREDLLRK
QRTFDNGSIPHQIHLGELHAILRRQEDFYPFLKDNREKIEKILTFRIPYY
VGPLARGNSRFAWMTRKSEETITPWNFEEVVDKGASAQSFIERMTNFDKN
LPNEKVLPKHSLLYEYFTVYNELTKVKYVTEGMRKPAFLSGEQKKAIVDL
LFKTNRKVTVKQLKEDYFKKIECFDSVEISGVEDRFNASLGTYHDLLKII
KDKDFLDNEENEDILEDIVLTLTLFEDREMIEERLKTYAHLFDDKVMKQL
KRRRYTGWGRLSRKLINGIRDKQSGKTILDFLKSDGFANRNFMQLIHDDS
LTFKEDIQKAQVSGQGDSLHEHIANLAGSPAIKKGILQTVKVVDELVKVM
GRHKPENIVIEMARENQTTQKGQKNSRERMKRIEEGIKELGSQILKEHPV
ENTQLQNEKLYLYYLQNGRDMYVDQELDINRLSDYDVDHIVPQSFLKDDS
IDNKVLTRSDKNRGKSDNVPSEEVVKKMKNYWRQLLNAKLITQRKFDNLT
KAERGGLSELDKAGFIKRQLVETRQITKHVAQILDSRMNTKYDENDKLIR
EVKVITLKSKLVSDFRKDFQFYKVREINNYHHAHDAYLNAVVGTALIKKY
PKLESEFVYGDYKVYDVRKMIAKSEQEIGKATAKYFFYSNIMNFFKTEIT
LANGEIRKRPLIETNGETGEIVWDKGRDFATVRKVLSMPQVNIVKKTEIQ
TVGQNGGLFDDNPKSPLEVTPSKLVPLKKELNPKKYGGYQKPTTAYPVLL
ITDTKQLIPISVMNKKQFEQNPVKFLRDRGYQQVGKNDFIKLPKYTLVDI
GDGIKRLWASSKEIHKGNQLVVSKKSQILLYHAHHLDSDLSNDYLQNHNQ
QFDVLFNEIISFSKKCKLGKEHIQKIENVYSNKKNSASIEELAESFIKLL
GFTQLGATSPFNFLGVKLNQKQYKGKKDYILPCTEGTLIRQSITGLYETR
VDLSKIGED

[0172] In other embodiments, the napDNAbp of any of the disclosed base editors is a prokaryotic homolog of an Argonaute protein. Prokaryotic homologs of Argonaute proteins are known and have been described, for example, in Makarova K., et al., “Prokaryotic homologs of Argonaute proteins are predicted to function as key components of a novel system of defense against mobile genetic elements”, Biol Direct. 2009 Aug. 25; 4:29. doi: 10.1186/1745-6150-4-29, the entire contents of which is hereby incorporated by reference. In some embodiments, the napDNAbp is a Marinitoga piezophila Argunaute (MpAgo) protein. The CRISPR-associated Marinitoga piezophila Argunaute (MpAgo) protein cleaves single-stranded target sequences using 5′-phosphorylated guides. The 5′ guides are used by all known Argonautes. The crystal structure of an MpAgo-RNA complex shows a guide strand binding site comprising residues that block 5′ phosphate interactions. This data suggests the evolution of an Argonaute subclass with noncanonical specificity for a 5′-hydroxylated guide. See, e.g., Kaya et al., “A bacterial Argonaute with noncanonical guide RNA specificity”, Proc Natl Acad Sci USA. 2016 Apr. 12; 113(15):4057-62, the entire contents of which are hereby incorporated by reference). It should be appreciated that other argonaute proteins may be used, and are within the scope of this disclosure.

[0173] In some embodiments, the napDNAbp is a single effector of a microbial CRISPR-Cas system. Single effectors of microbial CRISPR-Cas systems include, without limitation, Cas9, Cpf1, C2c1, C2c2, and C2c3. Typically, microbial CRISPR-Cas systems are divided into Class 1 and Class 2 systems. Class 1 systems have multisubunit effector complexes, while Class 2 systems have a single protein effector. For example, Cas9 and Cpf1 are Class 2 effectors. In addition to Cas9 and Cpf1, three distinct Class 2 CRISPR-Cas systems (C2c1, C2c2, and C2c3) have been described by Shmakov et al., “Discovery and Functional Characterization of Diverse Class 2 CRISPR Cas Systems”, Mol. Cell, 2015 Nov. 5; 60(3): 385-397, the entire contents of which is hereby incorporated by reference. Effectors of two of the systems, C2c1 and C2c3, contain RuvC-like endonuclease domains related to Cpf1. A third system, C2c2 contains an effector with two predicated HEPN RNase domains. Production of mature CRISPR RNA is tracrRNA-independent, unlike production of CRISPR RNA by C2c1. C2c1 depends on both CRISPR RNA and tracrRNA for DNA cleavage. Bacterial C2c2 has been shown to possess a unique RNase activity for CRISPR RNA maturation distinct from its RNA-activated single-stranded RNA degradation activity. These RNase functions are different from each other and from the CRISPR RNA-processing behavior of Cpf1. See, e.g., East-Seletsky, et al., “Two distinct RNase activities of CRISPR-C2c2 enable guide-RNA processing and RNA detection”, Nature, 2016 Oct. 13; 538(7624):270-273, the entire contents of which are hereby incorporated by reference. In vitro biochemical analysis of C2c2 in Leptotrichia shahii has shown that C2c2 is guided by a single CRISPR RNA and can be programed to cleave ssRNA targets carrying complementary protospacers. Catalytic residues in the two conserved HEPN domains mediate cleavage. Mutations in the catalytic residues generate catalytically inactive RNA-binding proteins. See e.g., Abudayyeh et al., “C2c2 is a single-component programmable RNA-guided RNA-targeting CRISPR effector”, Science, 2016 Aug. 5; 353(6299), the entire contents of which are hereby incorporated by reference.

[0174] The crystal structure of Alicyclobaccillus acidoterrastris C2c1 (AacC2c1) has been reported in complex with a chimeric single-molecule guide RNA (sgRNA). See e.g., Liu et al., “C2c1-sgRNA Complex Structure Reveals RNA-Guided DNA Cleavage Mechanism”, Mol. Cell, 2017 Jan. 19; 65(2):310-322, the entire contents of which are hereby incorporated by reference. The crystal structure has also been reported in Alicyclobacillus acidoterrestris C2c1 bound to target DNAs as ternary complexes. See e.g., Yang et al., “PAM-dependent Target DNA Recognition and Cleavage by C2C1 CRISPR-Cas endonuclease”, Cell, 2016 Dec. 15; 167(7):1814-1828, the entire contents of which are hereby incorporated by reference. Catalytically competent conformations of AacC2c1, both with target and non-target DNA strands, have been captured independently positioned within a single RuvC catalytic pocket, with C2c1-mediated cleavage resulting in a staggered seven-nucleotide break of target DNA. Structural comparisons between C2c1 ternary complexes and previously identified Cas9 and Cpf1 counterparts demonstrate the diversity of mechanisms used by CRISPR-Cas9 systems.

[0175] In some embodiments, the napDNAbp may be a C2c1, a C2c2, or a C2c3 protein. In some embodiments, the napDNAbp is a C2c1 protein. In some embodiments, the napDNAbp is a C2c2 protein. In some embodiments, the napDNAbp is a C2c3 protein. In some embodiments, the napDNAbp comprises an amino acid sequence that is at least 85%, at least 90%, at least 91%, at least 92%, at least 93%, at least 94%, at least 95%, at least 96%, at least 97%, at least 98%, at least 99%, or at least 99.5% identical to a naturally-occurring C2c1, C2c2, or C2c3 protein. In some embodiments, the napDNAbp is a naturally-occurring C2c1, C2c2, or C2c3 protein.

[0176] Some aspects of the disclosure provide Cas9 domains that have different PAM specificities. Typically, Cas9 proteins, such as Cas9 from S. pyogenes (spCas9), require a canonical NGG PAM sequence to bind a particular nucleic acid region. This may limit the ability to edit desired bases within a genome. In some embodiments, the base editing base editors provided herein may need to be placed at a precise location, for example where a target base is placed within a 4 base region (e.g., a “editing window” or a “target window”), which is approximately 15 bases upstream of the PAM. See Komor, A. C., et al., “Programmable editing of a target base in genomic DNA without double-stranded DNA cleavage” Nature 533, 420-424 (2016), the entire contents of which are hereby incorporated by reference. Accordingly, in some embodiments, any of the base editors provided herein may contain a Cas9 domain that is capable of binding a nucleotide sequence that does not contain a canonical (e.g., NGG) PAM sequence. Cas9 domains that bind to non-canonical PAM sequences have been described in the art and would be apparent to the skilled artisan. For example, Cas9 domains that bind non-canonical PAM sequences have been described in Kleinstiver, B. P., et al., “Engineered CRISPR-Cas9 nucleases with altered PAM specificities” Nature 523, 481-485 (2015); and Kleinstiver, B. P., et al., “Broadening the targeting range of Staphylococcus aureus CRISPR-Cas9 by modifying PAM recognition” Nature Biotechnology 33, 1293-1298 (2015); the entire contents of each are hereby incorporated by reference.

[0177] For example, a napDNAbp domain with altered PAM specificity, such as a domain with at least 80%, at least 85%, at least 90%, at least 95%, or at least 99% sequence identity with wild type Francisella novicida Cpf1 (SEQ ID NO: 125) (D917, E1006, and D1255), which has the following amino acid sequence:

(SEQ ID NO: 125)
MSIYQEFVNKYSLSKTLRFELIPQGKTLENIKARGLILDDEKRAKDYKKA
KQIIDKYHQFFIEEILSSVCISEDLLQNYSDVYFKLKKSDDDNLQKDFKS
AKDTIKKQISEYIKDSEKFKNLFNQNLIDAKKGQESDLILWLKQSKDNGI
ELFKANSDITDIDEALEIIKSFKGWTTYFKGFHENRKNVYSSNDIPTSII
YRIVDDNLPKFLENKAKYESLKDKAPEAINYEQIKKDLAEELTFDIDYKT
SEVNQRVFSLDEVFEIANFNNYLNQSGITKFNTIIGGKFVNGENTKRKGI
NEYINLYSQQINDKTLKKYKMSVLFKQILSDTESKSFVIDKLEDDSDVVT
TMQSFYEQIAAFKTVEEKSIKETLSLLFDDLKAQKLDLSKIYFKNDKSLT
DLSQQVFDDYSVIGTAVLEYITQQIAPKNLDNPSKKEQELIAKKTEKAKY
LSLETIKLALEEFNKHRDIDKQCRFEEILANFAAIPMIFDEIAQNKDNLA
QISIKYQNQGKKDLLQASAEDDVKAIKDLLDQTNNLLHKLKIFHISQSED
KANILDKDEHFYLVFEECYFELANIVPLYNKIRNYITQKPYSDEKFKLNF
ENSTLANGWDKNKEPONTAILFIKDDKYYLGVMNKKNNKIFDDKAIKENK
GEGYKKIVYKLLPGANKMLPKVFFSAKSIKFYNPSEDILRIRNHSTHTKN
GSPQKGYEKFEFNIEDCRKFIDFYKQSISKHPEWKDFGFRFSDTQRYNSI
DEFYREVENQGYKLTFENISESYIDSVVNQGKLYLFQIYNKDFSAYSKGR
PNLHTLYWKALFDERNLQDVVYKLNGEAELFYRKQSIPKKITHPAKEAIA
NKNKDNPKKESVFEYDLIKDKRFTEDKFFFHCPITINFKSSGANKFNDEI
NLLLKEKANDVHILSIDRGERHLAYYTLVDGKGNIIKQDTFNIIGNDRMK
TNYHDKLAAIEKDRDSARKDWKKINNIKEMKEGYLSQVVHEIAKLVIEYN
AIVVFEDLNFGFKRGRFKVEKQVYQKLEKMLIEKLNYLVFKDNEFDKTGG
VLRAYQLTAPFETFKKMGKQTGIIYYVPAGFTSKICPVTGFVNQLYPKYE
SVSKSQEFFSKFDKICYNLDKGYFEFSFDYKNFGDKAAKGKWTIASFGSR
LINFRNSDKNHNWDTREVYPTKELEKLLKDYSIEYGHGECIKAAICGESD
KKFFAKLTSVLNTILQMRNSKTGTELDYLISPVADVNGNFFDSRQAPKNM
PQDADANGAYHIGLKGLMLLGRIKNNQEGKKLNLVIKNEEYFEFVQNRNN

[0178] An additional napDNAbp domain with altered PAM specificity, such as a domain having at least 80%, at least 85%, at least 90%, at least 95%, or at least 99% sequence identity with wild type Geobacillus thermodenitrificans Cas9 (SEQ ID NO: 126), which has the following amino acid sequence:

(SEQ ID NO: 126)
MKYKIGLDIGITSIGWAVINLDIPRIEDLGVRIFDRAENPKTGESLALPR
RLARSARRRLRRRKHRLERIRRLFVREGILTKEELNKLFEKKHEIDVWQL
RVEALDRKLNNDELARILLHLAKRRGFRSNRKSERTNKENSTMLKHIEEN
QSILSSYRTVAEMVVKDPKFSLHKRNKEDNYTNTVARDDLEREIKLIFAK
QREYGNIVCTEAFEHEYISIWASQRPFASKDDIEKKVGFCTFEPKEKRAP
KATYTFQSFTVWEHINKLRLVSPGGIRALTDDERRLIYKQAFHKNKITFH
DVRTLLNLPDDTRFKGLLYDRNTTLKENEKVRFLELGAYHKIRKAIDSVY
GKGAAKSFRPIDFDTFGYALTMFKDDTDIRSYLRNEYEQNGKRMENLADK
VYDEELIEELLNLSFSKFGHLSLKALRNILPYMEQGEVYSTACERAGYTF
TGPKKKQKTVLLPNIPPIANPVVMRALTQARKVVNAIIKKYGSPVSIHIE
LARELSQSFDERRKMQKEQEGNRKKNETAIRQLVEYGLTLNPTGLDIVKF
KLWSEQNGKCAYSLQPIEIERLLEPGYTEVDHVIPYSRSLDDSYTNKVLV
LTKENREKGNRTPAEYLGLGSERWQQFETFVLTNKQFSKKKRDRLLRLHY
DENEENEFKNRNLNDTRYISRFLANFIREHLKFADSDDKQKVYTVNGRIT
AHLRSRWNFNKNREESNLHHAVDAAIVACTTPSDIARVTAFYQRREQNKE
LSKKTDPQFPQPWPHFADELQARLSKNPKESIKALNLGNYDNEKLESLQP
VFVSRMPKRSITGAAHQETLRRYIGIDERSGKIQTVVKKKLSEIQLDKTG
HFPMYGKESDPRTYEAIRQRLLEHNNDPKKAFQEPLYKPKKNGELGPIIR
TIKIIDTTNQVIPLNDGKTVAYNSNIVRVDVFEKDGKYYCVPIYTIDMMK
GILPNKAIEPNKPYSEWKEMTEDYTFRFSLYPNDLIRIEFPREKTIKTAV
GEEIKIKDLFAYYQTIDSSNGGLSLVSHDNNFSLRSIGSRTLKRFEKYQV
DVLGNIYKVRGEKRVGVASSSHSKAGETIRPL

[0179] In some embodiments, the nucleic acid programmable DNA binding protein (napDNAbp) is a nucleic acid programmable DNA binding protein that does not require a canonical (NGG) PAM sequence. In some embodiments, the napDNAbp is an argonaute protein. One example of such a nucleic acid programmable DNA binding protein is an Argonaute protein from Natronobacterium gregoryi (NgAgo). NgAgo is a ssDNA-guided endonuclease. NgAgo binds 5′ phosphorylated ssDNA of ˜24 nucleotides (gDNA) to guide it to its target site and will make DNA double-strand breaks at the gDNA site. In contrast to Cas9, the NgAgo—gDNA system does not require a protospacer-adjacent motif (PAM). Using a nuclease inactive NgAgo (dNgAgo) can greatly expand the bases that may be targeted. The characterization and use of NgAgo have been described in Gao et al., Nat Biotechnol., 34(7): 768-73 (2016), PubMed PMID: 27136078; Swarts et al., Nature, 507(7491): 258-61 (2014); and Swarts et al., Nucleic Acids Res. 43(10) (2015): 5120-9, each of which is incorporated herein by reference. The sequence of Natronobacterium gregoryi Argonaute is provided in SEQ ID NO: 127.

[0180] The disclosed base editors may comprise a napDNAbp domain having at least 80%, at least 85%, at least 90%, at least 95%, or at least 99% sequence identity with wild type Natronobacterium gregoryi Argonaute (SEQ ID NO: 127), which has the following amino acid sequence:

(SEQ ID NO: 127)
MTVIDLDSTTTADELTSGHTYDISVTLTGVYDNTDEQHPRMSLAFEQDNG
ERRYITLWKNTTPKDVFTYDYATGSTYIFTNIDYEVKDGYENLTATYQTT
VENATAQEVGTTDEDETFAGGEPLDHRLDDALNETPDDAETESDSGHVMT
SFASRDQLPEWTLHTYTLTATDGAKTDTEYARRTLAYTVRQELYTDHDAA
PVATDGLMLLTPEPLGETPLDLDCGVRVEADETRTLDYTTAKDRLLAREL
VEEGLKRSLWDDYLVRGIDEVLSKEPVLTCDEFDLHERYDLSVEVGHSGR
AYLHINFRHRFVPKLTLADIDDDNIYPGLRVKTTYRPRRGHIVWGLRDEC
ATDSLNTLGNQSVVAYHRNNQTPINTDLLDAIEAADRRVVETRRQGHGDD
AVSFPQELLAVEPNTHQIKQFASDGFHQQARSKTRLSASRCSEKAQAFAE
RLDPVRLNGSTVEFSSEFFTGNNEQQLRLLYENGESVLTFRDGARGAHPD
ETFSKGIVNPPESFEVAVVLPEQQADTCKAQWDTMADLLNQAGAPPTRSE
TVQYDAFSSPESISLNVAGAIDPSEVDAAFVVLPPDQEGFADLASPTETY
DELKKALANMGIYSQMAYFDRFRDAKIFYTRNVALGLLAAAGGVAFTTEH
AMPGDADMFIGIDVSRSYPEDGASGQINIAATATAVYKDGTILGHSSTRP
QLGEKLQSTDVRDIMKNAILGYQQVTGESPTHIVIHRDGFMNEDLDPATE
FLNEQGVEYDIVEIRKQPQTRLLAVSDVQYDTPVKSIAAINQNEPRATVA
TFGAPEYLATRDGGGLPRPIQIERVAGETDIETLTRQVYLLSQSHIQVHN
STARLPITTAYADQASTHATKGYLVQTGAFESNVGFL

[0181] Cas9 Circular Permutants

[0182] In various embodiments, the base editors disclosed herein may comprise a circular permutant of Cas9.

[0183] The term “circularly permuted Cas9” or “circular permutant” of Cas9 or “CP-Cas9”) refers to any Cas9 protein, or variant thereof, that occurs or has been modify to engineered as a circular permutant variant, which means the N-terminus and the C-terminus of a Cas9 protein (e.g., a wild type Cas9 protein) have been topically rearranged. Such circularly permuted Cas9 proteins, or variants thereof, retain the ability to bind DNA when complexed with a guide RNA (gRNA). See, Oakes et al., “Protein Engineering of Cas9 for enhanced function,” Methods Enzymol, 2014, 546: 491-511 and Oakes et al., “CRISPR-Cas9 Circular Permutants as Programmable Scaffolds for Genome Modification,” Cell, Jan. 10, 2019, 176: 254-267, and Huang, T. P. et al. Circularly permuted and PAM-modified Cas9 variants broaden the targeting scope of base editors. Nat. Biotechnol. 37, 626-631 (2019). each of are incorporated herein by reference. Reference is also made to International Application No. PCT/US2019/47996, filed Aug. 23, 2019, herein incorporated by reference. The instant disclosure contemplates any previously known CP-Cas9 or use a new CP-Cas9 so long as the resulting circularly permuted protein retains the ability to bind DNA when complexed with a guide RNA (gRNA).

[0184] Any of the Cas9 proteins described herein, including any variant, ortholog, or naturally occurring Cas9 or equivalent thereof, may be reconfigured as a circular permutant variant.

[0185] In various embodiments, the circular permutants of Cas9 may have the following structure:

[0186] N-terminus-[original C-terminus]-[optional linker]-[original N-terminus]-C-terminus.

[0187] As an example, the present disclosure contemplates the following circular permutants of canonical S. pyogenes Cas9 (1368 amino acids of UniProtKB—Q99ZW2 (CAS9_STRP1) (numbering is based on the amino acid position in SEQ ID NO: 9)):

[0188] N-terminus-[1268-1368]-[optional linker]-[1-1267]-C-terminus;

[0189] N-terminus-[1168-1368]-[optional linker]-[1-1167]-C-terminus;

[0190] N-terminus-[1068-1368]-[optional linker]-[1-1067]-C-terminus;

[0191] N-terminus-[968-1368]-[optional linker]-[1-967]-C-terminus;

[0192] N-terminus-[868-1368]-[optional linker]-[1-867]-C-terminus;

[0193] N-terminus-[768-1368]-[optional linker]-[1-767]-C-terminus;

[0194] N-terminus-[668-1368]-[optional linker]-[1-667]-C-terminus;

[0195] N-terminus-[568-1368]-[optional linker]-[1-567]-C-terminus;

[0196] N-terminus-[468-1368]-[optional linker]-[1-467]-C-terminus;

[0197] N-terminus-[368-1368]-[optional linker]-[1-367]-C-terminus;

[0198] N-terminus-[268-1368]-[optional linker]-[1-267]-C-terminus;

[0199] N-terminus-[168-1368]-[optional linker]-[1-167]-C-terminus;

[0200] N-terminus-[68-1368]-[optional linker]-[1-67]-C-terminus; or

[0201] N-terminus-[10-1368]-[optional linker]-[1-9]-C-terminus, or the corresponding circular permutants of other Cas9 proteins (including other Cas9 orthologs, variants, etc).

[0202] In particular embodiments, the circular permuant Cas9 has the following structure (based on S. pyogenes Cas9 (1368 amino acids of UniProtKB—Q99ZW2 (CAS9_STRP1) (numbering is based on the amino acid position in SEQ ID NO: 9): N-terminus-[102-1368]-[optional linker]-[1-101]-C-terminus; N-terminus-[1028-1368]-[optional linker]-[1-1027]-C-terminus; N-terminus-[1041-1368]-[optional linker]-[1-1043]-C-terminus; N-terminus-[1249-1368]-[optional linker]-[1-1248]-C-terminus; or N-terminus-[1300-1368]-[optional linker]-[1-1299]-C-terminus, or the corresponding circular permutants of other Cas9 proteins (including other Cas9 orthologs, variants, etc).

[0203] In still other embodiments, the circular permuant Cas9 has the following structure (based on S. pyogenes Cas9 (1368 amino acids of UniProtKB—Q99ZW2 (CAS9_STRP1) (numbering is based on the amino acid position in SEQ ID NO: 9): N-terminus-[103-1368]-[optional linker]-[1-102]-C-terminus; N-terminus-[1029-1368]-[optional linker]-[1-1028]-C-terminus; N-terminus-[1042-1368]-[optional linker]-[1-1041]-C-terminus; N-terminus-[1250-1368]-[optional linker]-[1-1249]-C-terminus; or N-terminus-[1301-1368]-[optional linker]-[1-1300]-C-terminus, or the corresponding circular permutants of other Cas9 proteins (including other Cas9 orthologs, variants, etc.).

[0204] In some embodiments, the circular permutant can be formed by linking a C-terminal fragment of a Cas9 to an N-terminal fragment of a Cas9, either directly or by using a linker, such as an amino acid linker. In some embodiments, The C-terminal fragment may correspond to the C-terminal 95% or more of the amino acids of a Cas9 (e.g., amino acids about 1300-1368), or the C-terminal 90%, 85%, 80%, 75%, 70%, 65%, 60%, 55%, 50%, 45%, 40%, 35%, 30%, 25%, 20%, 15%, 10%, or 5% or more of a Cas9. The N-terminal portion may correspond to the N-terminal 95% or more of the amino acids of a Cas9 (e.g., amino acids about 1-1300), or the N-terminal 90%, 85%, 80%, 75%, 70%, 65%, 60%, 55%, 50%, 45%, 40%, 35%, 30%, 25%, 20%, 15%, 10%, or 5% or more of a Cas9 (e.g., of SEQ ID NO: 9).

[0205] In some embodiments, the circular permutant can be formed by linking a C-terminal fragment of a Cas9 to an N-terminal fragment of a Cas9, either directly or by using a linker, such as an amino acid linker. In some embodiments, the C-terminal fragment that is rearranged to the N-terminus, includes or corresponds to the C-terminal 30% or less of the amino acids of a Cas9 (e.g., amino acids 1012-1368 of SEQ ID NO: 9). In some embodiments, the C-terminal fragment that is rearranged to the N-terminus, includes or corresponds to the C-terminal 30%, 29%, 28%, 27%, 26%, 25%, 24%, 23%, 22%, 21%, 20%, 19%, 18%, 17%, 16%, 15%, 14%, 13%, 12%, 11%, 10%, 9%, 8%, 7%, 6%, 5%, 4%, 3%, 2%, or 1% of the amino acids of a Cas9 (e.g., the Cas9 of SEQ ID NO: 9). In some embodiments, the C-terminal fragment that is rearranged to the N-terminus, includes or corresponds to the C-terminal 410 residues or less of a Cas9 (e.g., the Cas9 of SEQ ID NO: 9). In some embodiments, the C-terminal portion that is rearranged to the N-terminus, includes or corresponds to the C-terminal 410, 400, 390, 380, 370, 360, 350, 340, 330, 320, 310, 300, 290, 280, 270, 260, 250, 240, 230, 220, 210, 200, 190, 180, 170, 160, 150, 140, 130, 120, 110, 100, 90, 80, 70, 60, 50, 40, 30, 20, or 10 residues of a Cas9 (e.g., the Cas9 of SEQ ID NO: 9). In some embodiments, the C-terminal portion that is rearranged to the N-terminus, includes or corresponds to the C-terminal 357, 341, 328, 120, or 69 residues of a Cas9 (e.g., the Cas9 of SEQ ID NO: 9).

[0206] In other embodiments, circular permutant Cas9 variants may be defined as a topological rearrangement of a Cas9 primary structure based on the following method, which is based on S. pyogenes Cas9 of SEQ ID NO: 9: (a) selecting a circular permutant (CP) site corresponding to an internal amino acid residue of the Cas9 primary structure, which dissects the original protein into two halves: an N-terminal region and a C-terminal region; (b) modifying the Cas9 protein sequence (e.g., by genetic engineering techniques) by moving the original C-terminal region (comprising the CP site amino acid) to proceed the original N-terminal region, thereby forming a new N-terminus of the Cas9 protein that now begins with the CP site amino acid residue. The CP site can be located in any domain of the Cas9 protein, including, for example, the helical-II domain, the RuvCIII domain, or the CTD domain. For example, the CP site may be located (relative the S. pyogenes Cas9 of SEQ ID NO: 9) at original amino acid residue 181, 199, 230, 270, 310, 1010, 1016, 1023, 1029, 1041, 1247, 1249, or 1282. Thus, once relocated to the N-terminus, original amino acid 181, 199, 230, 270, 310, 1010, 1016, 1023, 1029, 1041, 1247, 1249, or 1282 would become the new N-terminal amino acid. Nomenclature of these CP-Cas9 proteins may be referred to as Cas9-CP¹⁸¹, Cas9-CP¹⁹⁹, Cas9-CP²³⁰, Cas9-CP²⁷⁰, Cas9-CP³¹⁰, Cas9-CP¹⁰¹⁰, Cas9-CP¹⁰¹⁶, Cas9-CP¹⁰²³, Cas9-CP¹⁰²⁹, Cas9-CP¹⁰⁴¹, Cas9-CP¹²⁴⁷, Cas9-CP¹²⁴⁹, and Cas9-CP¹²⁸², respectively. This description is not meant to be limited to making CP variants from SEQ ID NO: 9, but may be implemented to make CP variants in any Cas9 sequence, either at CP sites that correspond to these positions, or at other CP sites entirely. This description is not meant to limit the specific CP sites in any way. Virtually any CP site may be used to form a CP-Cas9 variant.

[0207] Exemplary CP-Cas9 amino acid sequences, based on the Cas9 of SEQ ID NO: 9, are provided below in which linker sequences are indicated by underlining and optional methionine (M) residues are indicated in bold. It should be appreciated that the disclosure provides CP-Cas9 sequences that do not include a linker sequence or that include different linker sequences. It should be appreciated that CP-Cas9 sequences may be based on Cas9 sequences other than that of SEQ ID NO: 9 and any examples provided herein are not meant to be limiting. Exemplary CP-Cas9 sequences are as follows:

| CP name | Sequence | SEQ ID NO: |
|---|---|---|
| CP1012 | DYKVYDVRKMIAKSEQEIGKATAKYFFYSNIMNFFKTEITLANGEIRKRPLIETN | SEQ ID NO: 128 |
| | GETGEIVWDKGRDFATVRKVLSMPQVNIVKKTEVQTGGFSKESILPKRNSDKLIA | |
| | RKKDWDPKKYGGFDSPTVAYSVLVVAKVEKGKSKKLKSVKELLGITIMERSSFEK | |
| | NPIDFLEAKGYKEVKKDLIIKLPKYSLFELENGRKRMLASAGELQKGNELALPSK | |
| | YVNFLYLASHYEKLKGSPEDNEQKQLFVEQHKHYLDEIIEQISEFSKRVILADAN | |
| | LDKVLSAYNKHRDKPIREQAENIIHLFTLTNLGAPAAFKYFDTTIDRKRYTSTKE | |
| | VLDATLIHQSITGLYETRIDLSQLGGDGGSGGSGGSGGSGGSGGSGGDKKYSIGL | |
| | AIGTNSVGWAVITDEYKVPSKKFKVLGNTDRHSIKKNLIGALLFDSGETAEATRL | |
| | KRTARRRYTRRKNRICYLQEIFSNEMAKVDDSFFHRLEESFLVEEDKKHERHPIF | |
| | GNIVDEVAYHEKYPTIYHLRKKLVDSTDKADLRLIYLALAHMIKFRGHFLIEGDL | |
| | NPONSDVDKLFIQLVQTYNQLFEENPINASGVDAKAILSARLSKSRRLENLIAQL | |
| | PGEKKNGLFGNLIALSLGLTPNFKSNFDLAEDAKLQLSKDTYDDDLDNLLAQIGD | |
| | QYADLFLAAKNLSDAILLSDILRVNTEITKAPLSASMIKRYDEHHQDLTLLKALV | |
| | RQQLPEKYKEIFFDQSKNGYAGYIDGGASQEEFYKFIKPILEKMDGTEELLVKLN | |
| | REDLLRKQRTFDNGSIPHQIHLGELHAILRRQEDFYPFLKDNREKIEKILTFRIP | |
| | YYVGPLARGNSRFAWMTRKSEETITPWNFEEVVDKGASAQSFIERMTNFDKNLPN | |
| | EKVLPKHSLLYEYFTVYNELTKVKYVTEGMRKPAFLSGEQKKAIVDLLFKTNRKV | |
| | TVKQLKEDYFKKIECFDSVEISGVEDRFNASLGTYHDLLKIIKDKDFLDNEENED | |
| | ILEDIVLTLTLFEDREMIEERLKTYAHLFDDKVMKQLKRRRYTGWGRLSRKLING | |
| | IRDKQSGKTILDFLKSDGFANRNFMQLIHDDSLTFKEDIQKAQVSGQGDSLHEHI | |
| | ANLAGSPAIKKGILQTVKVVDELVKVMGRHKPENIVIEMARENQTTQKGQKNSRE | |
| | RMKRIEEGIKELGSQILKEHPVENTQLQNEKLYLYYLQNGRDMYVDQELDINRLS | |
| | DYDVDHIVPQSFLKDDSIDNKVLTRSDKNRGKSDNVPSEEVVKKMKNYWRQLLNA | |
| | KLITQRKFDNLTKAERGGLSELDKAGFIKRQLVETRQITKHVAQILDSRMNTKYD | |
| | ENDKLIREVKVITLKSKLVSDFRKDFQFYKVREINNYHHAHDAYLNAVVGTALIK | |
| | KYPKLESEFVYG | |
| CP1028 | EIGKATAKYFFYSNIMNFFKTEITLANGEIRKRPLIETNGETGEIVWDKGRDFAT | SEQ ID NO: 129 |
| | VRKVLSMPQVNIVKKTEVQTGGFSKESILPKRNSDKLIARKKDWDPKKYGGFDSP | |
| | TVAYSVLVVAKVEKGKSKKLKSVKELLGITIMERSSFEKNPIDFLEAKGYKEVKK | |
| | DLIIKLPKYSLFELENGRKRMLASAGELQKGNELALPSKYVNFLYLASHYEKLKG | |
| | SPEDNEQKQLFVEQHKHYLDEIIEQISEFSKRVILADANLDKVLSAYNKHRDKPI | |
| | REQAENIIHLFTLTNLGAPAAFKYFDTTIDRKRYTSTKEVLDATLIHQSITGLYE | |
| | TRIDLSQLGGDGGSGGSGGSGGSGGSGGSGGMDKKYSIGLAIGTNSVGWAVITDE | |
| | YKVPSKKFKVLGNTDRHSIKKNLIGALLFDSGETAEATRLKRTARRRYTRRKNRI | |
| | CYLQEIFSNEMAKVDDSFFHRLEESFLVEEDKKHERHPIFGNIVDEVAYHEKYPT | |
| | IYHLRKKLVDSTDKADLRLIYLALAHMIKFRGHFLIEGDLNPONSDVDKLFIQLV | |
| | QTYNQLFEENPINASGVDAKAILSARLSKSRRLENLIAQLPGEKKNGLFGNLIAL | |
| | SLGLTPNFKSNFDLAEDAKLQLSKDTYDDDLDNLLAQIGDQYADLFLAAKNLSDA | |
| | ILLSDILRVNTEITKAPLSASMIKRYDEHHQDLTLLKALVRQQLPEKYKEIFFDQ | |
| | SKNGYAGYIDGGASQEEFYKFIKPILEKMDGTEELLVKLNREDLLRKQRTFDNGS | |
| | IPHQIHLGELHAILRRQEDFYPFLKDNREKIEKILTFRIPYYVGPLARGNSRFAW | |
| | MTRKSEETITPWNFEEVVDKGASAQSFIERMTNFDKNLPNEKVLPKHSLLYEYFT | |
| | VYNELTKVKYVTEGMRKPAFLSGEQKKAIVDLLFKTNRKVTVKQLKEDYFKKIEC | |
| | FDSVEISGVEDRFNASLGTYHDLLKIIKDKDFLDNEENEDILEDIVLTLTLFEDR | |
| | EMIEERLKTYAHLFDDKVMKQLKRRRYTGWGRLSRKLINGIRDKQSGKTILDFLK | |
| | SDGFANRNFMQLIHDDSLTFKEDIQKAQVSGQGDSLHEHIANLAGSPAIKKGILQ | |
| | TVKVVDELVKVMGRHKPENIVIEMARENQTTQKGQKNSRERMKRIEEGIKELGSQ | |
| | ILKEHPVENTQLQNEKLYLYYLQNGRDMYVDQELDINRLSDYDVDHIVPQSFLKD | |
| | DSIDNKVLTRSDKNRGKSDNVPSEEVVKKMKNYWRQLLNAKLITQRKFDNLTKAE | |
| | RGGLSELDKAGFIKRQLVETRQITKHVAQILDSRMNTKYDENDKLIREVKVITLK | |
| | SKLVSDFRKDFQFYKVREINNYHHAHDAYLNAVVGTALIKKYPKLESEFVYGDYK | |
| | VYDVRKMIAKSEQ | |
| CP1041 | NIMNFFKTEITLANGEIRKRPLIETNGETGEIVWDKGRDFATVRKVLSMPQVNIV | SEQ ID NO: 130 |
| | KKTEVQTGGFSKESILPKRNSDKLIARKKDWDPKKYGGFDSPTVAYSVLVVAKVE | |
| | KGKSKKLKSVKELLGITIMERSSFEKNPIDFLEAKGYKEVKKDLIIKLPKYSLFE | |
| | LENGRKRMLASAGELQKGNELALPSKYVNFLYLASHYEKLKGSPEDNEQKQLFVE | |
| | QHKHYLDEIIEQISEFSKRVILADANLDKVLSAYNKHRDKPIREQAENIIHLFTL | |
| | TNLGAPAAFKYFDTTIDRKRYTSTKEVLDATLIHQSITGLYETRIDLSQLGGDGG | |
| | SGGSGGSGGSGGSGGSGGDKKYSIGLAIGTNSVGWAVITDEYKVPSKKFKVLGNT | |
| | DRHSIKKNLIGALLFDSGETAEATRLKRTARRRYTRRKNRICYLQEIFSNEMAKV | |
| | DDSFFHRLEESFLVEEDKKHERHPIFGNIVDEVAYHEKYPTIYHLRKKLVDSTDK | |
| | ADLRLIYLALAHMIKFRGHFLIEGDLNPONSDVDKLFIQLVQTYNQLFEENPINA | |
| | SGVDAKAILSARLSKSRRLENLIAQLPGEKKNGLFGNLIALSLGLTPNFKSNFDL | |
| | AEDAKLQLSKDTYDDDLDNLLAQIGDQYADLFLAAKNLSDAILLSDILRVNTEIT | |
| | KAPLSASMIKRYDEHHQDLTLLKALVRQQLPEKYKEIFFDQSKNGYAGYIDGGAS | |
| | QEEFYKFIKPILEKMDGTEELLVKLNREDLLRKQRTFDNGSIPHQIHLGELHAIL | |
| | RRQEDFYPFLKDNREKIEKILTFRIPYYVGPLARGNSRFAWMTRKSEETITPWNF | |
| | EEVVDKGASAQSFIERMTNFDKNLPNEKVLPKHSLLYEYFTVYNELTKVKYVTEG | |
| | MRKPAFLSGEQKKAIVDLLFKTNRKVTVKQLKEDYFKKIECFDSVEISGVEDRFN | |
| | ASLGTYHDLLKIIKDKDFLDNEENEDILEDIVLTLTLFEDREMIEERLKTYAHLF | |
| | DDKVMKQLKRRRYTGWGRLSRKLINGIRDKQSGKTILDFLKSDGFANRNFMQLIH | |
| | DDSLTFKEDIQKAQVSGQGDSLHEHIANLAGSPAIKKGILQTVKVVDELVKVMGR | |
| | HKPENIVIEMARENQTTQKGQKNSRERMKRIEEGIKELGSQILKEHPVENTQLQN | |
| | EKLYLYYLQNGRDMYVDQELDINRLSDYDVDHIVPQSFLKDDSIDNKVLTRSDKN | |
| | RGKSDNVPSEEVVKKMKNYWRQLLNAKLITQRKFDNLTKAERGGLSELDKAGFIK | |
| | RQLVETRQITKHVAQILDSRMNTKYDENDKLIREVKVITLKSKLVSDFRKDFQFY | |
| | KVREINNYHHAHDAYLNAVVGTALIKKYPKLESEFVYGDYKVYDVRKMIAKSEQE | |
| | IGKATAKYFFYS | |
| CP1249 | PEDNEQKQLFVEQHKHYLDEIIEQISEFSKRVILADANLDKVLSAYNKHRDKPIR | SEQ ID NO: 131 |
| | EQAENIIHLFTLTNLGAPAAFKYFDTTIDRKRYTSTKEVLDATLIHQSITGLYET | |
| | RIDLSQLGGDGGSGGSGGSGGSGGSGGSGGMDKKYSIGLAIGTNSVGWAVITDEY | |
| | KVPSKKFKVLGNTDRHSIKKNLIGALLFDSGETAEATRLKRTARRRYTRRKNRIC | |
| | YLQEIFSNEMAKVDDSFFHRLEESFLVEEDKKHERHPIFGNIVDEVAYHEKYPTI | |
| | YHLRKKLVDSTDKADLRLIYLALAHMIKFRGHFLIEGDLNPONSDVDKLFIQLVQ | |
| | TYNQLFEENPINASGVDAKAILSARLSKSRRLENLIAQLPGEKKNGLFGNLIALS | |
| | LGLTPNFKSNFDLAEDAKLQLSKDTYDDDLDNLLAQIGDQYADLFLAAKNLSDAI | |
| | LLSDILRVNTEITKAPLSASMIKRYDEHHQDLTLLKALVRQQLPEKYKEIFFDQS | |
| | KNGYAGYIDGGASQEEFYKFIKPILEKMDGTEELLVKLNREDLLRKQRTFDNGSI | |
| | PHQIHLGELHAILRRQEDFYPFLKDNREKIEKILTFRIPYYVGPLARGNSRFAWM | |
| | TRKSEETITPWNFEEVVDKGASAQSFIERMTNFDKNLPNEKVLPKHSLLYEYFTV | |
| | YNELTKVKYVTEGMRKPAFLSGEQKKAIVDLLFKTNRKVTVKQLKEDYFKKIECF | |
| | DSVEISGVEDRFNASLGTYHDLLKIIKDKDFLDNEENEDILEDIVLTLTLFEDRE | |
| | MIEERLKTYAHLFDDKVMKQLKRRRYTGWGRLSRKLINGIRDKQSGKTILDFLKS | |
| | DGFANRNFMQLIHDDSLTFKEDIQKAQVSGQGDSLHEHIANLAGSPAIKKGILQT | |
| | VKVVDELVKVMGRHKPENIVIEMARENQTTQKGQKNSRERMKRIEEGIKELGSQI | |
| | LKEHPVENTQLQNEKLYLYYLQNGRDMYVDQELDINRLSDYDVDHIVPQSFLKDD | |
| | SIDNKVLTRSDKNRGKSDNVPSEEVVKKMKNYWRQLLNAKLITQRKFDNLTKAER | |
| | GGLSELDKAGFIKRQLVETRQITKHVAQILDSRMNTKYDENDKLIREVKVITLKS | |
| | KLVSDFRKDFQFYKVREINNYHHAHDAYLNAVVGTALIKKYPKLESEFVYGDYKV | |
| | YDVRKMIAKSEQEIGKATAKYFFYSNIMNFFKTEITLANGEIRKRPLIETNGETG | |
| | EIVWDKGRDFATVRKVLSMPQVNIVKKTEVQTGGFSKESILPKRNSDKLIARKKD | |
| | WDPKKYGGFDSPTVAYSVLVVAKVEKGKSKKLKSVKELLGITIMERSSFEKNPID | |
| | FLEAKGYKEVKKDLIIKLPKYSLFELENGRKRMLASAGELQKGNELALPSKYVNF | |
| | LYLASHYEKLKGS | |
| CP1300 | KPIREQAENIIHLFTLTNLGAPAAFKYFDTTIDRKRYTSTKEVLDATLIHQSITG | SEQ ID NO: 132 |
| | LYETRIDLSQLGGDGGSGGSGGSGGSGGSGGSGGDKKYSIGLAIGTNSVGWAVIT | |
| | DEYKVPSKKFKVLGNTDRHSIKKNLIGALLFDSGETAEATRLKRTARRRYTRRKN | |
| | RICYLQEIFSNEMAKVDDSFFHRLEESFLVEEDKKHERHPIFGNIVDEVAYHEKY | |
| | PTIYHLRKKLVDSTDKADLRLIYLALAHMIKFRGHFLIEGDLNPONSDVDKLFIQ | |
| | LVQTYNQLFEENPINASGVDAKAILSARLSKSRRLENLIAQLPGEKKNGLFGNLI | |
| | ALSLGLTPNFKSNFDLAEDAKLQLSKDTYDDDLDNLLAQIGDQYADLFLAAKNLS | |
| | DAILLSDILRVNTEITKAPLSASMIKRYDEHHQDLTLLKALVRQQLPEKYKEIFF | |
| | DQSKNGYAGYIDGGASQEEFYKFIKPILEKMDGTEELLVKLNREDLLRKQRTFDN | |
| | GSIPHQIHLGELHAILRRQEDFYPFLKDNREKIEKILTFRIPYYVGPLARGNSRF | |
| | AWMTRKSEETITPWNFEEVVDKGASAQSFIERMTNFDKNLPNEKVLPKHSLLYEY | |
| | FTVYNELTKVKYVTEGMRKPAFLSGEQKKAIVDLLFKTNRKVTVKQLKEDYFKKI | |
| | ECFDSVEISGVEDRFNASLGTYHDLLKIIKDKDFLDNEENEDILEDIVLTLTLFE | |
| | DREMIEERLKTYAHLFDDKVMKQLKRRRYTGWGRLSRKLINGIRDKQSGKTILDF | |
| | LKSDGFANRNFMQLIHDDSLTFKEDIQKAQVSGQGDSLHEHIANLAGSPAIKKGI | |
| | LQTVKVVDELVKVMGRHKPENIVIEMARENQTTQKGQKNSRERMKRIEEGIKELG | |
| | SQILKEHPVENTQLQNEKLYLYYLQNGRDMYVDQELDINRLSDYDVDHIVPQSFL | |
| | KDDSIDNKVLTRSDKNRGKSDNVPSEEVVKKMKNYWRQLLNAKLITQRKFDNLTK | |
| | AERGGLSELDKAGFIKRQLVETRQITKHVAQILDSRMNTKYDENDKLIREVKVIT | |
| | LKSKLVSDFRKDFQFYKVREINNYHHAHDAYLNAVVGTALIKKYPKLESEFVYGD | |
| | YKVYDVRKMIAKSEQEIGKATAKYFFYSNIMNFFKTEITLANGEIRKRPLIETNG | |
| | ETGEIVWDKGRDFATVRKVLSMPQVNIVKKTEVQTGGFSKESILPKRNSDKLIAR | |
| | KKDWDPKKYGGFDSPTVAYSVLVVAKVEKGKSKKLKSVKELLGITIMERSSFEKN | |
| | PIDFLEAKGYKEVKKDLIIKLPKYSLFELENGRKRMLASAGELQKGNELALPSKY | |
| | VNFLYLASHYEKLKGSPEDNEQKQLFVEQHKHYLDEIIEQISEFSKRVILADANL | |
| | DKVLSAYNKHRD | |

[0208] The Cas9 circular permutants that may be useful in the base editor constructs described herein. Exemplary C-terminal fragments of Cas9, based on the Cas9 of SEQ ID NO: 9, which may be rearranged to an N-terminus of Cas9, are provided below. It should be appreciated that such C-terminal fragments of Cas9 are exemplary and are not meant to be limiting. These exemplary CP-Cas9 fragments have the following sequences:

| CP name | Sequence | SEQ ID NO: |
|---|---|---|
| CP1012 C- | DYKVYDVRKMIAKSEQEIGKATAKYFFYSNIMNFFKTEITLANGEIRKRPLIETN | SEQ ID NO: 133 |
| terminal | GETGEIVWDKGRDFATVRKVLSMPQVNIVKKTEVQTGGFSKESILPKRNSDKLIA | |
| fragment | RKKDWDPKKYGGFDSPTVAYSVLVVAKVEKGKSKKLKSVKELLGITIMERSSFEK | |
| | NPIDFLEAKGYKEVKKDLIIKLPKYSLFELENGRKRMLASAGELQKGNELALPSK | |
| | YVNFLYLASHYEKLKGSPEDNEQKQLFVEQHKHYLDEIIEQISEFSKRVILADAN | |
| | LDKVLSAYNKHRDKPIREQAENIIHLFTLTNLGAPAAFKYFDTTIDRKRYTSTKE | |
| | VLDATLIHQSITGLYETRIDLSQLGGD | |
| CP1028 C- | EIGKATAKYFFYSNIMNFFKTEITLANGEIRKRPLIETNGETGEIVWDKGRDFAT | SEQ ID NO: 134 |
| terminal | VRKVLSMPQVNIVKKTEVQTGGFSKESILPKRNSDKLIARKKDWDPKKYGGFDSP | |
| fragment | TVAYSVLVVAKVEKGKSKKLKSVKELLGITIMERSSFEKNPIDFLEAKGYKEVKK | |
| | DLIIKLPKYSLFELENGRKRMLASAGELQKGNELALPSKYVNFLYLASHYEKLKG | |
| | SPEDNEQKQLFVEQHKHYLDEIIEQISEFSKRVILADANLDKVLSAYNKHRDKPI | |
| | REQAENIIHLFTLTNLGAPAAFKYFDTTIDRKRYTSTKEVLDATLIHQSITGLYE | |
| | TRIDLSQLGGD | |
| CP1041 C- | NIMNFFKTEITLANGEIRKRPLIETNGETGEIVWDKGRDFATVRKVLSMPQVNIV | SEQ ID NO: 135 |
| terminal | KKTEVQTGGFSKESILPKRNSDKLIARKKDWDPKKYGGFDSPTVAYSVLVVAKVE | |
| fragment | KGKSKKLKSVKELLGITIMERSSFEKNPIDFLEAKGYKEVKKDLIIKLPKYSLFE | |
| | LENGRKRMLASAGELQKGNELALPSKYVNFLYLASHYEKLKGSPEDNEQKQLFVE | |
| | QHKHYLDEIIEQISEFSKRVILADANLDKVLSAYNKHRDKPIREQAENIIHLFTL | |
| | TNLGAPAAFKYFDTTIDRKRYTSTKEVLDATLIHQSITGLYETRIDLSQLGGD | |
| CP1249 C- | PEDNEQKQLFVEQHKHYLDEIIEQISEFSKRVILADANLDKVLSAYNKHRDKPIR | SEQ ID NO: 136 |
| terminal | EQAENIIHLFTLTNLGAPAAFKYFDTTIDRKRYTSTKEVLDATLIHQSITGLYET | |
| fragment | RIDLSQLGGD | |
| CP1300 C- | KPIREQAENIIHLFTLTNLGAPAAFKYFDTTIDRKRYTSTKEVLDATLIHQSITG | SEQ ID NO: 137 |
| terminal | LYETRIDLSQLGGD | |
| fragment | | |

[0209] Cas9 Variants with Modified PAM Specificities

[0210] The base editors of the present disclosure may also comprise Cas9 variants with modified PAM specificities. Some aspects of this disclosure provide Cas9 proteins that exhibit activity on a target sequence that does not comprise the canonical PAM (5′-NGG-3′, where N is A, C, G, or T) at its 3′-end. In some embodiments, the Cas9 protein exhibits activity on a target sequence comprising a 5′-NGG-3′ PAM sequence at its 3′-end. In some embodiments, the Cas9 protein exhibits activity on a target sequence comprising a 5″-NNG-3′ PAM sequence at its 3′-end. In some embodiments, the Cas9 protein exhibits activity on a target sequence comprising a 5′-NNA-3′ PAM sequence at its 3′-end. In some embodiments, the Cas9 protein exhibits activity on a target sequence comprising a 5′-NNC-3′ PAM sequence at its 3′-end. In some embodiments, the Cas9 protein exhibits activity on a target sequence comprising a 5″-NNT-3′ PAM sequence at its 3′-end. In some embodiments, the Cas9 protein exhibits activity on a target sequence comprising a 5″-NGT-3″ PAM sequence at its 3′-end. In some embodiments, the Cas9 protein exhibits activity on a target sequence comprising a 5″-NGA-3′ PAM sequence at its 3′-end. In some embodiments, the Cas9 protein exhibits activity on a target sequence comprising a 5″-NGC-3′ PAM sequence at its 3′-end. In some embodiments, the Cas9 protein exhibits activity on a target sequence comprising a 5′-NAA-3′ PAM sequence at its 3′-end. In some embodiments, the Cas9 protein exhibits activity on a target sequence comprising a 5″-NAC-3′ PAM sequence at its 3′-end. In some embodiments, the Cas9 protein exhibits activity on a target sequence comprising a 5″-NAT-3′ PAM sequence at its 3′-end. In still other embodiments, the Cas9 protein exhibits activity on a target sequence comprising a 5″-NAG-3″ PAM sequence at its 3′-end.

[0211] In some embodiments, the disclosed base editors comprise a napDNAbp domain comprising a SpCas9-NG, which has a PAM that corresponds to NGN. In some embodiments, the disclosed base editors comprise a napDNAbp domain comprising a SpCas9-KKH, which has a PAM that corresponds to NNNRRT (SEQ ID NO: 140).

[0212] It should be appreciated that any of the amino acid mutations described herein, (e.g., A262T) from a first amino acid residue (e.g., A) to a second amino acid residue (e.g., T) may also include mutations from the first amino acid residue to an amino acid residue that is similar to (e.g., conserved) the second amino acid residue. For example, mutation of an amino acid with a hydrophobic side chain (e.g., alanine, valine, isoleucine, leucine, methionine, phenylalanine, tyrosine, or tryptophan) may be a mutation to a second amino acid with a different hydrophobic side chain (e.g., alanine, valine, isoleucine, leucine, methionine, phenylalanine, tyrosine, or tryptophan). For example, a mutation of an alanine to a threonine (e.g., a A262T mutation) may also be a mutation from an alanine to an amino acid that is similar in size and chemical properties to a threonine, for example, serine. As another example, mutation of an amino acid with a positively charged side chain (e.g., arginine, histidine, or lysine) may be a mutation to a second amino acid with a different positively charged side chain (e.g., arginine, histidine, or lysine). As another example, mutation of an amino acid with a polar side chain (e.g., serine, threonine, asparagine, or glutamine) may be a mutation to a second amino acid with a different polar side chain (e.g., serine, threonine, asparagine, or glutamine). Additional similar amino acid pairs include, but are not limited to, the following: phenylalanine and tyrosine; asparagine and glutamine; methionine and cysteine; aspartic acid and glutamic acid; and arginine and lysine. The skilled artisan would recognize that such conservative amino acid substitutions will likely have minor effects on protein structure and are likely to be well tolerated without compromising function. In some embodiments, any amino of the amino acid mutations provided herein from one amino acid to a threonine may be an amino acid mutation to a serine. In some embodiments, any amino of the amino acid mutations provided herein from one amino acid to an arginine may be an amino acid mutation to a lysine. In some embodiments, any amino of the amino acid mutations provided herein from one amino acid to an isoleucine, may be an amino acid mutation to an alanine, valine, methionine, or leucine. In some embodiments, any amino of the amino acid mutations provided herein from one amino acid to a lysine may be an amino acid mutation to an arginine. In some embodiments, any amino of the amino acid mutations provided herein from one amino acid to an aspartic acid may be an amino acid mutation to a glutamic acid or asparagine. In some embodiments, any amino of the amino acid mutations provided herein from one amino acid to a valine may be an amino acid mutation to an alanine, isoleucine, methionine, or leucine. In some embodiments, any amino of the amino acid mutations provided herein from one amino acid to a glycine may be an amino acid mutation to an alanine. It should be appreciated, however, that additional conserved amino acid residues would be recognized by the skilled artisan and any of the amino acid mutations to other conserved amino acid residues are also within the scope of this disclosure.

[0213] In some embodiments, the present disclosure may utilize any of the Cas9 variants disclosed in the SEQUENCES section herein.

[0214] In some embodiments, the Cas9 protein comprises a combination of mutations that exhibit activity on a target sequence comprising a 5″-NAA-3″ PAM sequence at its 3″-end. In some embodiments, the combination of mutations are present in any one of the clones listed in Table 1. In some embodiments, the combination of mutations are conservative mutations of the clones listed in Table 1. In some embodiments, the Cas9 protein comprises the combination of mutations of any one of the Cas9 clones listed in Table 1.

TABLE 1
NAA PAM Clones

Mutations from wild-type SpCas9 (e.g., SEQ ID NO: 9)
D177N, K218R, D614N, D1135N, D1137S, E1219V, A1320V, A1323D, R1333K
D177N, K218R, D614N, D1135N, E1219V, Q1221H, H1264Y, A1320V, R1333K
A10T, I322V, S409I, E427G, G715C, D1135N, E1219V, Q1221H, H1264Y, A1320V, R1333K
A367T, K710E, R1114G, D1135N, P1137S, E1219V, Q1221H, H1264Y, A1320V, R1333K
A10T, I322V, S409I, E427G, R753G, D861N, D1135N, K1188R, E1219V, Q1221H, H264H,
A1320V, R1333K
A10T, I322V, S409I, E427G, R654L, V743I, R753G, M1021T, D1135N, D1180G, K1211R,
E1219V, Q1221H, H1264Y, A1320V, R1333K
A10T, I322V, S409I, E427G, V743I, R753G, E762G, D1135N, D1180G, K1211R, E1219V,
Q1221H, H1264Y, A1320V, R1333K
A10T, I322V, S409I, E427G, R753G, D1135N, D1180G, K1211R, E1219V, Q12210, H1264Y,
S1274R, A1320V, R1333K
A10T, I322V, S409I, E427G, A589S, R753G, D1135N, E1219V, Q1221H, H1264H, A1320V,
R1333K
A10T, I322V, S409I, E427G, R753G, E757K, G865G, D1135N, E1219V, Q1221H, H1264Y,
A1320V, R1333K
A10T, I322V, S409I, E427G, R654L, R753G, E757K, D1135N, E1219V, Q1221H, H1264Y,
A1320V, R1333K
A10T, I322V, S409I, E427G, K599R, M631A, R654L, K673E, V743I, R753G, N758H, E762G,
D1135N, D1180G, E1219V, Q1221H, Q1256R, H1264Y, A1320V, A1323D, R1333K
A10T, I322V, S409I, E427G, R654L, K673E, V743I, R753G, E762G, N869S, N1054D, R1114G,
D1135N, D1180G, E1219V, Q1221H, H1264Y, A1320V, A1323D, R1333K
A10T, I322V, S409I, E427G, R654L, L7271, V743I, R753G, E762G, R859S, N946D, F1134L,
D1135N, D1180G, E1219V, Q1221H, H1264Y, N1317T, A1320V, A13230, R1333K
A10T, I322V, S409I, E427G, R654L, K673E, V743I, R753G, E762G, N803S, N869S, Y1016D,
G10770, R1114G, F1134L, D1135N, D1180G, E1219V, Q1221H, H1264Y, V1290G, L1318S,
A1320V, A1323D, R1333K
A10T, I322V, S409I, E427G, R654L, K673E, V743I, R753G, E762G, N803S, N869S, Y1016D,
G1077D, R1114G, F1134L, D1135N, K1151E, D1180G, E1219V, Q1221H, H1264Y, V1290G,
L1318S, A1320V, R1333K
A10T, I322V, S409I, E427G, R654L, K673E, V743I, R753G, E762G, N803S, N869S, Y1016D,
G1077D, R1114G, F1134L, D1135N, D1180G, E1219V, Q1221H, H1264Y, V1290G, L1318S,
A1320V, A13230, R1333K
A10T, I322V, S409I, E427G, R654L, K673E, F693L, V743I, R753G, E762G, N803S, N869S,
L921P, Y1016D, G1077D, F1080S, R1114G, D1135N, D1180G, E1219V, Q1221H, H1264Y,
L1318S, A1320V, A1323H, R1333K
A10T, I322V, S409I, E427G, E630K, R654L, K673E, V7431, R753G, E762G, Q768H, N803S,
N869S, Y1016D, G1077D, R1114G, F1134L, D1135N, D1180G, E1219V, Q1221H, H1264Y,
L1318S, A1320V, R1333K
A10T, I322V, S409I, E427G, R654L, K673E, F693L, V743I, R753G, E762G, Q768H, N803S,
N869S, Y1016D, G1077D, R1114G, F1134L, D1135N, D1180G, E1219V, Q1221H, G1223S,
H1264Y, L1318S, A1320V, R1333K
A10T, I322V, S409I, E427G, R654L, K673E, F693L, V7431, R753G, E762G, N803S, N869S,
L921P, Y1016D, G1077D, F1801S, R1114G, D1135N, D1180G, E1219V, Q1221H, H1264Y,
L1318S, A1320V, A1323D, R1333K
A10T, I322V, S409I, E427G, R654L, V743I, R753G, M1021T, D1135N, D1180G, K1211R,
E1219V, Q1221H, H1264Y, A1320V, R1333K
A10T, I322V, S409I, E427G, R654L, K673E, V743I, R753G, E762G, M673I, N803S, N869S,
G1077D, R1114G, D1135N, V1139A, D1180G, E1219V, Q1221H, A1320V, R1333K
A10T, I322V, S409I, E427G, R654L, K673E, V743I, R753G, E762G, N803S, N869S, R1114G,
D1135N, E1219V, Q1221H, A1320V, R1333K

[0215] In some embodiments, the Cas9 protein comprises an amino acid sequence that is at least 80% identical to the amino acid sequence of a Cas9 protein as provided by any one of the variants of Table 1. In some embodiments, the Cas9 protein comprises an amino acid sequence that is at least 85%, at least 90%, at least 92%, at least 95%, at least 96%, at least 97%, at least 98%, at least 99%, or at least 99.5% identical to the amino acid sequence of a Cas9 protein as provided by any one of the variants of Table 1.

[0216] In some embodiments, the Cas9 protein exhibits an increased activity on a target sequence that does not comprise the canonical PAM (5′-NGG-3′) at its 3′ end as compared to Streptococcus pyogenes Cas9 as provided by SEQ ID NO: 9. In some embodiments, the Cas9 protein exhibits an activity on a target sequence having a 3′ end that is not directly adjacent to the canonical PAM sequence (5′-NGG-3′) that is at least 5-fold increased as compared to the activity of Streptococcus pyogenes Cas9 as provided by SEQ ID NO: 9 on the same target sequence. In some embodiments, the Cas9 protein exhibits an activity on a target sequence that is not directly adjacent to the canonical PAM sequence (5′-NGG-3′) that is at least 10-fold, at least 50-fold, at least 100-fold, at least 500-fold, at least 1,000-fold, at least 5,000-fold, at least 10,000-fold, at least 50,000-fold, at least 100,000-fold, at least 500,000-fold, or at least 1,000,000-fold increased as compared to the activity of Streptococcus pyogenes as provided by SEQ ID NO: 9 on the same target sequence. In some embodiments, the 3′ end of the target sequence is directly adjacent to an AAA, GAA, CAA, or TAA sequence. In some embodiments, the Cas9 protein comprises a combination of mutations that exhibit activity on a target sequence comprising a 5″-NAC-3″ PAM sequence at its 3′-end. In some embodiments, the combination of mutations are present in any one of the clones listed in Table 2. In some embodiments, the combination of mutations are conservative mutations of the clones listed in Table 2. In some embodiments, the Cas9 protein comprises the combination of mutations of any one of the Cas9 clones listed in Table 2.

TABLE 2
NAC PAM Clones

MUTATIONS FROM WILD-TYPE SPCAS9 (E.G., SEQ ID NO: 9)
T472I, R753G, K890E, D1332N, R1335Q, T1337N
I1057S, D1135N, P1301S, R1335Q, T1337N
T472I, R753G, D1332N, R1335Q, T1337N
D1135N, E1219V, D1332N, R1335Q, T1337N
T472I, R753G, K890E, D1332N, R1335Q, T1337N
I1057S, D1135N, P1301S, R1335Q, T1337N
T472I, R753G, D1332N, R1335Q, T1337N
T472I, R753G, Q771H, D1332N, R1335Q, T1337N
E627K, T638P, K652T, R753G, N8035, K959N, R1114G, D1135N, E1219V, D1332N, R1335Q,
T1337N
E627K, T638P, K652T, R753G, N8035, K959N, R1114G, D1135N, K1156E, E1219V, D1332N,
R1335Q, T1337N
E627K, T638P, V647I, R753G, N8035, K959N, G1030R, I1055E, R1114G, D1135N, E1219V,
D1332N, R1335Q, T1337N
E627K, E630G, T638P, V647A, G687R, N767D, N8035, K959N, R1114G, D1135N, E1219V,
D1332G, R1335Q, T1337N
E627K, T6380, R753G, N803S, K959N, R1114G, D1135N, E1219V, N1266H, D1332N, R1335Q,
T1337N
E627K, T6380, R753G, N803S, K959N, I1057T, R1114G, D1135N, E1219V, D1332N, R1335Q,
T1337N
E627K, T638P, R753G, N803S, K959N, R1114G, D1135N, E1219V, D1332N, R1335Q, T1337N
E627K, M631I, T638P, R753G, N803S, K959N, Y1036H, R1114G, D1135N, E1219V, D1251G,
D1332G, R1335Q, T1337N
E627K, T638P, R753G, N803S, V875I, K959N, Y1016C, R1114G, D1135N, E1219V, D1251G,
D1332G, R1335Q, T1337N, I1348V
K608R, E627K, T638P, V647I, R654L, R753G, N803S, T804A, K848N, V922A, K959N, R1114G,
D1135N, E1219V, D1332N, R1335Q, T1337N
K608R, E627K, T638P, V647I, R753G, N803S, V922A, K959N, K1014N, V1015A, R1114G,
D1135N, K1156N, E1219V, N1252D, D1332N, R1335Q, T1337N
K608R, E627K, R629G, T6380, V647I, A711T, R753G, K775R, K789E, N803S, K959N, V1015A,
Y1036H, R1114G, D1135N, E1219V, N1286H, D1332N, R1335Q, T1337N
K608R, E627K, T638P, V647I, T740A, R753G, N803S, K948E, K959N, Y1016S, R1114G,
D1135N, E1219V, N1286H, D1332N, R1335Q, T1337N
K608R, E627K, T638P, V647I, T740A, N803S, K948E, K959N, Y1016S, R1114G, D1135N,
E1219V, N1286H, D1332N, R1335Q, T1337N
I670S, K608R, E627K, E630G, T638P, V647I, R653K, R753G, I795L, K797N, N803S, K866R,
K890N, K959N, Y1016C, R1114G, D1135N, E1219V, D1332N, R1335Q, T1337N
K608R, E627K, T638P, V647I, T740A, G752R, R753G, K797N, N803S, K948E, K959N, V1015A,
Y1016S, R1114G, D1135N, E1219V, N1266H, D1332N, R1335Q, T1337N
I570T, A589V, K608R, E627K, T638P, V647I, R654L, Q716R, R753G, N803S, K948E, K959N,
Y1016S, R1114G, D1135N, E1207G, E1219V, N1234D, D1332N, R1335Q, T1337N
K608R, E627K, R629G, T638P, V647I, R654L, Q740R, R753G, N803S, K959N, N990S, T995S,
V1015A, I1036D, R1114G, D1135N, E1207G, E1219V, N12340, N12660, D1332N, R1335Q,
T1337N
I562F, V5650, 1570T, K608R, L625S, E627K, T638P, V647I, R654I, G752R, R753G, N803S,
N808D, K959N, M1021L, R1114G, D1135N, N1177S, N12340, D1332N, R1335Q, T1337N
I562F, I570T, K608R, E627K, T638P, V647I, R753G, E790A, N803S, K959N, V1015A, Y1036H,
R1114G, D1135N, D1180E, A1184T, E1219V, D13320, R1335Q, T1337N
I570T, K608R, E627K, T638P, V647I, R654H, R753G, E790A, D803S, K9590, V1015A, R1114G,
D1127A, D1135N, E1219V, D1332H, R1335Q, T1337N
I570T, K608R, L625S, E627K, T6380, V647I, R654I, T703P, R753G, N803S, N808D, K9590,
M1021L, R1114G, D1135N, E1219V, D1332H, R1335Q, T1337N
I570S, K608R, E627K, E630G, T638P, V647I, R653K, R753G, I795L, D803S, K866R, K890N,
K959N, Y1016C, R1114G, D1135N, E1219V, D1332N, R1335Q, T1337N
I570T, K608R, E627K, T638P, V647I, R654H, R753G, E790A, N803S, K959N, V1016A, R1114G,
D1135N, E1219V, K1246E, D1332N, R1335Q, T1337N
K608R, E627K, T638P, V647I, R654L, K673E, R753G, E790A, D803S, K948E, K959N, R1114G,
D1127G, D1135H, D1180E, E1219V, N1286H, D1332N, R1335Q, T1337N
K608R, L625S, E627K, T638P, V647I, R654I, I670T, R753G, N803S, N808D, K959N, M1021L,
R1114G, D1135N, E1219V, N1286H, D1332N, R1335Q, T1337N
E627K, M631V, T638P, V647I, K710E, R753G, N803S, N808D, K948E, M1021L, R1114G,
D1135N, E1219V, D1332N, R1335Q, T1337N, S1338T, H1349R

[0217] In some embodiments, the Cas9 protein comprises an amino acid sequence that is at least 80% identical to the amino acid sequence of a Cas9 protein as provided by any one of the variants of Table 2. In some embodiments, the Cas9 protein comprises an amino acid sequence that is at least 85%, at least 90%, at least 92%, at least 95%, at least 96%, at least 97%, at least 98%, at least 99%, or at least 99.5% identical to the amino acid sequence of a Cas9 protein as provided by any one of the variants of Table 2.

[0218] In some embodiments, the Cas9 protein comprises a combination of mutations that exhibit activity on a target sequence comprising a 5′-NAT-3′ PAM sequence at its 3′-end. In some embodiments, the combination of mutations are present in any one of the clones listed in Table 3. In some embodiments, the combination of mutations are conservative mutations of the clones listed in Table 3. In some embodiments, the Cas9 protein comprises the combination of mutations of any one of the Cas9 clones listed in Table 3.

TABLE 3
NAT PAM Clones

MUTATIONS FROM WILD-TYPE SPCAS9 (E.G., SEQ ID NO: 9)
K961E, H985Y, D1135N, K1191N, E1219V, Q1221H, A1320A, P1321S, R1335L
D1135N, G12185, E1219V, Q1221H, P1249S, P1321S, D1322G, R1335L
V743I, R753G, E790A, D1135N, G12185, E1219V, Q1221H, A1227V, P1249S, N1286K, A1293T,
P1321S, D1322G, R1335L, T1339I
F575S, M631L, R654L, V748I, V743I, R753G, D853E, V922A, R1114G D1135N, G1218S,
E1219V, Q1221H, A1227V, P1249S, N1286K, A1293T, P1321S, D1322G, R1335L, T1339I
F575S, M631L, R654L, R664K, R753G, D853E, V922A, R1114G D1135N, D1180G, G1218S,
E1219V, Q1221H, P1249S, N1286K, P1321S, D1322G, R1335L
M631L, R654L, R753G, K797E, D853E, V922A, D1012A, R1114G D1135N, G12185, E1219V,
Q1221H, P1249S, N1317K, P1321S, D1322G, R1335L
F575S, M631L, R654L, R664K, R753G, D853E, V922A, R1114G, Y1131C, D1135N, D1180G,
G1218S, E1219V, Q1221H, P1249S, P1321S, D1322G, R1335L
F575S, M631L, R654L, R664K, R753G, D853E, V922A, R1114G, Y1131C, D1135N, D1180G,
G1218S, E1219V, Q1221H, P1249S, P1321S, D1322G, R1335L
F575S, D596Y, M631L, R654L, R664K, R753G, D853E, V922A, R1114G, Y1131C, D1135N,
D1180G, G12185, E1219V, Q1221H, P1249S, Q1256R, P1321S, D1322G, R1335L
F575S, M631L, R654L, R664K, K710E, V750A, R753G, D853E, V922A, R1114G, Y1131C,
D1135N, D1180G, G1218S, E1219V, Q1221H, P1249S, P1321S, D1322G, R1335L
F575S, M631L, K649R, R654L, R664K, R753G, D853E, V922A, R1114G, Y1131C, D1135N,
K1156E, D1180G, G1218S, E1219V, Q1221H, P1249S, P1321S, D1322G, R1335L
F575S, M631L, R654L, R664K, R753G, D853E, V922A, R1114G, Y1131C, D1135N, D1180G,
G1218S, E1219V, Q1221H, P1249S, P1321S, D1322G, R1335L
F575S, M631L, R654L, R664K, R753G, D853E, V922A, I1057G, R1114G, Y1131C, D1135N,
D1180G, G1218S, E1219V, Q1221H, P1249S, N1308D, P1321S, D1322G, R1335L
M631L, R654L, R753G, D853E, V922A, R1114G, Y1131C, D1135N, E1150V, D1180G, G1218S,
E1219V, Q1221H, P1249S, P1321S, D1332G, R1335L
M631L, R654L, R664K, R753G, D853E, I1057V, Y1131C, D1135N, D1180G, G1218S, E1219V,
Q1221H, P1249S, P1321S, D1332G, R1335L
M631L, R654L, R664K, R753G, I1057V, R1114G, Y1131C, D1135N, D1180G, G1218S, E1219V,
Q1221H, P1249S, P1321S, D1332G, R1335L

[0219] The above description of various napDNAbps which can be used in connection with the presently disclose base editors is not meant to be limiting in any way. The base editors may comprise the canonical SpCas9, or any ortholog Cas9 protein, or any variant Cas9 protein—including any naturally occurring variant, mutant, or otherwise engineered version of Cas9—that is known or which can be made or evolved through a directed evolutionary or otherwise mutagenic process. In various embodiments, the Cas9 or Cas9 variants have a nickase activity, i.e., only cleave of strand of the target DNA sequence. In other embodiments, the Cas9 or Cas9 variants have inactive nucleases, i.e., are “dead” Cas9 proteins. Other variant Cas9 proteins that may be used are those having a smaller molecular weight than the canonical SpCas9 (e.g., for easier delivery) or having modified or rearranged primary amino acid structure (e.g., the circular permutant formats). The base editors described herein may also comprise Cas9 equivalents, including Cas12a/Cpf1 and Cas12b proteins which are the result of convergent evolution. The napDNAbps used herein (e.g., SpCas9, Cas9 variant, or Cas9 equivalents) may also may also contain various modifications that alter/enhance their PAM specifities. Lastly, the application contemplates any Cas9, Cas9 variant, or Cas9 equivalent which has at least 70%, at least 75%, at least 80%, at least 85%, at least 90%, at least 91%, at least 92%, at least 93%, at least 94%, at least 95%, at least 96%, at least 97%, at least 98%, at least 99%, or at least 99.9% sequence identity to a reference Cas9 sequence, such as a references SpCas9 canonical sequences or a reference Cas9 equivalent (e.g., Cas12a/Cpf1).

[0220] In a particular embodiment, the Cas9 variant having expanded PAM capabilities is SpCas9 (H840A) VRQR, or SpCas9-VRQR. In some embodiments, the disclosed base editors comprise a napDNAbp domain that has a sequence that is at least 90%, at least 95%, at least 98%, or at least 99% identical to SpCas9-VRQR. In some embodiments, the disclosed base editors comprise a napDNAbp domain that comprises SpCas9-VRQR. The SpCas9-VRQR comprises the following amino acid sequence (with the V, R, Q, R substitutions relative to the SpCas9 (H840A) of SEQ ID NO: 138 show, in bold underline. In addition, the methionine residue in SpCas9 (H840) was removed for SpCas9 (H840A) VRQR):

(SEQ ID NO: 138)
DKKYSIGLDIGTNSVGWAVITDEYKVPSKKFKVLGNTDRHSIKKNLIGALLFDSGETAEATRLKRTARRRYTRRKNRICYLQE
IFSNEMAKVDDSFFHRLEESFLVEEDKKHERHPIFGNIVDEVAYHEKYPTIYHLRKKLVDSTDKADLRLIYLALAHMIKFRGH
FLIEGDLNPONSDVDKLFIQLVQTYNQLFEENPINASGVDAKAILSARLSKSRRLENLIAQLPGEKKNGLFGNLIALSLGLTP
NFKSNFDLAEDAKLQLSKDTYDDDLDNLLAQIGDQYADLFLAAKNLSDAILLSDILRVNTEITKAPLSASMIKRYDEHHQDLT
LLKALVRQQLPEKYKEIFFDQSKNGYAGYIDGGASQEEFYKFIKPILEKMDGTEELLVKLNREDLLRKQRTFDNGSIPHQIHL
GELHAILRRQEDFYPFLKDNREKIEKILTFRIPYYVGPLARGNSRFAWMTRKSEETITPWNFEEVVDKGASAQSFIERMTNFD
KNLPNEKVLPKHSLLYEYFTVYNELTKVKYVTEGMRKPAFLSGEQKKAIVDLLFKTNRKVTVKQLKEDYFKKIECFDSVEISG
VEDRFNASLGTYHDLLKIIKDKDFLDNEENEDILEDIVLTLTLFEDREMIEERLKTYAHLFDDKVMKQLKRRRYTGWGRLSRK
LINGIRDKQSGKTILDFLKSDGFANRNFMQLIHDDSLTFKEDIQKAQVSGQGDSLHEHIANLAGSPAIKKGILQTVKVVDELV
KVMGRHKPENIVIEMARENQTTQKGQKNSRERMKRIEEGIKELGSQILKEHPVENTQLQNEKLYLYYLQNGRDMYVDQELDIN
RLSDYDVDAIVPQSFLKDDSIDNKVLTRSDKNRGKSDNVPSEEVVKKMKNYWRQLLNAKLITQRKFDNLTKAERGGLSELDKA
GFIKRQLVETRQITKHVAQILDSRMNTKYDENDKLIREVKVITLKSKLVSDFRKDFQFYKVREINNYHHAHDAYLNAVVGTAL
IKKYPKLESEFVYGDYKVYDVRKMIAKSEQEIGKATAKYFFYSNIMNFFKTEITLANGEIRKRPLIETNGETGEIVWDKGRDF
ATVRKVLSMPQVNIVKKTEVQTGGFSKESILPKRNSDKLIARKKDWDPKKYGGFVSPTVAYSVLVVAKVEKGKSKKLKSVKEL
LGITIMERSSFEKNPIDFLEAKGYKEVKKDLIIKLPKYSLFELENGRKRMLASARELQKGNELALPSKYVNFLYLASHYEKLK
GSPEDNEQKQLFVEQHKHYLDEIIEQISEFSKRVILADANLDKVLSAYNKHRDKPIREQAENIIHLFTLTNLGAPAAFKYFDT
TIDRKQYRSTKEVLDATLIHQSITGLYETRIDLSQLGGD

[0221] In another particular embodiment, the Cas9 variant having expanded PAM capabilities is SpCas9 (H840A) VRER, having the following amino acid sequence (with the V, R, E, R substitutions relative to the SpCas9 (H840A) of SEQ ID NO: 139 are shown in bold underline. In addition, the methionine residue in SpCas9 (H840) was removed for SnCas9 (H840A1 VRER):

(SEQ ID NO: 139)
DKKYSIGLDIGTNSVGWAVITDEYKVPSKKFKVLGNTDRHSIKKNLIGALLFDSGETAEATRLKRTARRRYTRRKNRICYLQE
IFSNEMAKVDDSFFHRLEESFLVEEDKKHERHPIFGNIVDEVAYHEKYPTIYHLRKKLVDSTDKADLRLIYLALAHMIKFRGH
FLIEGDLNPONSDVDKLFIQLVQTYNQLFEENPINASGVDAKAILSARLSKSRRLENLIAQLPGEKKNGLFGNLIALSLGLTP
NFKSNFDLAEDAKLQLSKDTYDDDLDNLLAQIGDQYADLFLAAKNLSDAILLSDILRVNTEITKAPLSASMIKRYDEHHQDLT
LLKALVRQQLPEKYKEIFFDQSKNGYAGYIDGGASQEEFYKFIKPILEKMDGTEELLVKLNREDLLRKQRTFDNGSIPHQIHL
GELHAILRRQEDFYPFLKDNREKIEKILTFRIPYYVGPLARGNSRFAWMTRKSEETITPWNFEEVVDKGASAQSFIERMTNFD
KNLPNEKVLPKHSLLYEYFTVYNELTKVKYVTEGMRKPAFLSGEQKKAIVDLLFKTNRKVTVKQLKEDYFKKIECFDSVEISG
VEDRFNASLGTYHDLLKIIKDKDFLDNEENEDILEDIVLTLTLFEDREMIEERLKTYAHLFDDKVMKQLKRRRYTGWGRLSRK
LINGIRDKQSGKTILDFLKSDGFANRNFMQLIHDDSLTFKEDIQKAQVSGQGDSLHEHIANLAGSPAIKKGILQTVKVVDELV
KVMGRHKPENIVIEMARENQTTQKGQKNSRERMKRIEEGIKELGSQILKEHPVENTQLQNEKLYLYYLQNGRDMYVDQELDIN
RLSDYDVDAIVPQSFLKDDSIDNKVLTRSDKNRGKSDNVPSEEVVKKMKNYWRQLLNAKLITQRKFDNLTKAERGGLSELDKA
GFIKRQLVETRQITKHVAQILDSRMNTKYDENDKLIREVKVITLKSKLVSDFRKDFQFYKVREINNYHHAHDAYLNAVVGTAL
IKKYPKLESEFVYGDYKVYDVRKMIAKSEQEIGKATAKYFFYSNIMNFFKTEITLANGEIRKRPLIETNGETGEIVWDKGRDF
ATVRKVLSMPQVNIVKKTEVQTGGFSKESILPKRNSDKLIARKKDWDPKKYGGFVSPTVAYSVLVVAKVEKGKSKKLKSVKEL
LGITIMERSSFEKNPIDFLEAKGYKEVKKDLIIKLPKYSLFELENGRKRMLASARELQKGNELALPSKYVNFLYLASHYEKLK
GSPEDNEQKQLFVEQHKHYLDEIIEQISEFSKRVILADANLDKVLSAYNKHRDKPIREQAENIIHLFTLTNLGAPAAFKYFDT
TIDRKEYRSTKEVLDATLIHQSITGLYETRIDLSQLGGD

[0222] In addition, any available methods may be utilized to obtain or construct a variant or mutant Cas9 protein. The term “mutation,” as used herein, refers to a substitution of a residue within a sequence, e.g., a nucleic acid or amino acid sequence, with another residue, or a deletion or insertion of one or more residues within a sequence. Mutations are typically described herein by identifying the original residue followed by the position of the residue within the sequence and by the identity of the newly substituted residue. Various methods for making the amino acid substitutions (mutations) provided herein are well known in the art, and are provided by, for example, Green and Sambrook, Molecular Cloning: A Laboratory Manual (4th ed., Cold Spring Harbor Laboratory Press, Cold Spring Harbor, N.Y. (2012)). Mutations can include a variety of categories, such as single base polymorphisms, microduplication regions, indel, and inversions, and is not meant to be limiting in any way. Mutations can include “loss-of-function” mutations which is the normal result of a mutation that reduces or abolishes a protein activity. Most loss-of-function mutations are recessive, because in a heterozygote the second chromosome copy carries an unmutated version of the gene coding for a fully functional protein whose presence compensates for the effect of the mutation. Mutations also embrace “gain-of-function” mutations, which is one which confers an abnormal activity on a protein or cell that is otherwise not present in a normal condition. Many gain-of-function mutations are in regulatory sequences rather than in coding regions, and can therefore have a number of consequences. For example, a mutation might lead to one or more genes being expressed in the wrong tissues, these tissues gaining functions that they normally lack. Because of their nature, gain-of-function mutations are usually dominant.

[0223] Mutations can be introduced into a reference Cas9 protein using site-directed mutagenesis. Older methods of site-directed mutagenesis known in the art rely on sub-cloning of the sequence to be mutated into a vector, such as an M13 bacteriophage vector, that allows the isolation of single-stranded DNA template. In these methods, one anneals a mutagenic primer (i.e., a primer capable of annealing to the site to be mutated but bearing one or more mismatched nucleotides at the site to be mutated) to the single-stranded template and then polymerizes the complement of the template starting from the 3′ end of the mutagenic primer. The resulting duplexes are then transformed into host bacteria and plaques are screened for the desired mutation. More recently, site-directed mutagenesis has employed PCR methodologies, which have the advantage of not requiring a single-stranded template. In addition, methods have been developed that do not require sub-cloning. Several issues must be considered when PCR-based site-directed mutagenesis is performed. First, in these methods it is desirable to reduce the number of PCR cycles to prevent expansion of undesired mutations introduced by the polymerase. Second, a selection must be employed in order to reduce the number of non-mutated parental molecules persisting in the reaction. Third, an extended-length PCR method is preferred in order to allow the use of a single PCR primer set. And fourth, because of the non-template-dependent terminal extension activity of some thermostable polymerases it is often necessary to incorporate an end-polishing step into the procedure prior to blunt-end ligation of the PCR-generated mutant product.

[0224] Any of the references noted above which relate to napDNAbp domains are hereby incorporated by reference in their entireties, if not already stated so.

II. Adenosine methyltransferases

[0225] In various embodiments, the transversion base editors provided herein comprise an adenosine methyltransferase. The adenosine methyltransferase may be modified from its wild type form. Modified methyltransferases may be obtained by, e.g., evolving a reference version (e.g., an RNA modification enzyme, such as an mRNA and/or tRNA methyltransferase) using a continuous evolution process (e.g., PACE) or non-continuous evolution process (e.g., PANCE or plate-based selections) described herein so that the methyltransferase domain is effective on a nucleic acid target. See Zhang C. & Jia, G., Reversible RNA Modification N1-methyladenosine (m¹A) in mRNA and tRNA, Genomics Proteomics Bioinformatics 16:155-161 (2018), the contents of which is herein incorporated by reference in its entirety.

[0226] An exemplary nucleobase modification domain comprising an adenosine methyltransferase is shown in FIG. 1A. In some embodiments, the modification domain is a TRM61 monomer (e.g., human or S. cerevisiae), or a TRM6/61A dimer (e.g., human or S. cerevisiae), or evolved a variant thereof.

[0227] The desired adenosine methylation reaction produces an N1-methyladenosine (m1A). The presence of an adenine base on the unmutated strand induces the steric rotation of the N1-methyladenosine product to the Hoogsteen orientation in order to base pair with an adenine base on the non-edited strand (FIG. 1B). See Chawla M. et al., An atlas of RNA base pairs involving modified nucleobases with optimal geometries and accurate energies, Nucleic Acid Res. (2015), the disclosure of which is herein incorporated by reference in its entirety.

[0228] Some exemplary adenosine methyltransferase domains that may be fused to Cas9 domains according to embodiments of this disclosure are provided below.

TRMT6 (human)
(SEQ ID NO: 16)
MEGSGEQPGPQPQHPGDHRIRDGDFVVLKREDVFKAVQVQRRKKVTFEKQW
FYLDNVIGHSYGTAFEVTSGGSLQPKKKREEPTAETKEAGTDNRNIVDDGKSQKLTQ
DDIKALKDKGIKGEEIVQQLIENSTTFRDKTEFAQDKYIKKKKKKYEAIITVVKPSTRI
LSIMYYAREPGKINHMRYDTLAQMLTLGNIRAGNKMIVMETCAGLVLGAMMERMG
GFGSIIQLYPGGGPVRAATACFGFPKSFLSGLYEFPLNKVDSLLHGTFSAKMLSSEPK
DSALVEESNGTLEEKQASEQENEDSMAEAPESNHPEDQETMETISQDPEHKGPKERG
SKKDYIQEKQRRQEEQRKRHLEAAALLSERNADGLIVASRFHPTPLLLSLLDFVAPSR
PFVVYCQYKEPLLECYTKLRERGGVINLRLSETWLRNYQVLPDRSHPKLLMSGGGG
YLLSGFTVAMDNLKADTSLKSNASTLESHETEEPAAKKRKCPESDS
TRMT61A (human)
(SEQ ID NO: 17)
MSFVAYEELIKEGDTAILSLGHGAMVAVRVQRGAQTQTRHGVLRHSVDLIGR
PFGSKVTCGRGGWVYVLHPTPELWTLNLPHRTQILYSTDIALITMMLELRPGSVVCE
SGTGSGSVSHAIIRTIAPTGHLHTVEFHQQRAEKAREEFQEHRVGRWVTVRTQDVCR
SGFGVSHVADAVFLDIPSPWEAVGHAWDALKVEGGRFCSFSPCIEQVQRTCQALAA
RGFSELSTLEVLPQVYNVRTVSLPPPDLGTGTDGPAGSDTSPFRSGTPMKEAVGHTG
YLTFATKTPG
S. cerevisiae TRM6
(SEQ ID NO: 19)
MNALTTIDFNQHVIVRLPSKNYKIVELKPNTSVSLGKFGAFEVNDIIGYPFGLT
FEIYYDGEEVSSDENRDSKPKNKIPIGKVRLLSQEIKDVNNDKDDGQSEPPLSIKEKSV
SLELSSIDSSATNQNLVNMGSKAQELTVEEIEKMKQESLSSKEIIDKIIKSHKSFHNKT
VYSQEKYVNRKKQKFAKYFTVEYLSSSNLLQFLIDKGDIQRVLDMSQESMGMLLNL
ANIQSEGNYLCMDETGGLLVYFLLERMFGGDNESKSKGKVIVIHENEHANLDLLKFA
NYSEKFIKEHVHTISLLDFFEPPTLQEIQSRFTPLPKEEARALKGGKKNSYYRKLRWY
NTQLQILELTGEFLYDGLVMATTLHLPTLVPKLAEKIHGSRPIVCYGQFKETLLELAH
TLYSDLRFLAPSILETRCRPYQSIRGKLHPLMTMKGGGGYLMWCHRVIPAPEPVSEN
ATAADSSEKLAEHGAKKQKI
S. cerevisiae TRM61
(SEQ ID NO: 57)
MSTNCFSGYKDLIKEGDLTLIWVSRDNIKPVRMHSEEVFNTRYGSFPHKDIIG
KPYGSQIAIRTKGSNKFAFVHVLQPTPELWTLSLPHRTQIVYTPDSSYIMQRLNCSPHS
RVIEAGTGSGSFSHAFARSVGHLFSFEFHHIRYEQALEEFKEHGLIDDNVTITHRDVC
QGGFLIKKGDTTSYEFGNNETAASLNANVVFLDLPAPWDAIPHLDSVISVDEKVGLC
CFSPCIEQVDKTLDVLEKYGWTDVEMVEIQGRQYESRRQMVRSLNDALERLRDIKR
HKLQGVERRKRMFNNTIDSNDEKVGKRNEDGVPLTEKAKFNPFGKGSRIKEGDSNY
KWKEVTKMEAEIKSHTSYLTFAFKVVNRSRDDEKVNEILRSTEK
TRMT61B (human)
(SEQ ID NO: 58)
[sequence omitted]
TRMT10C (human)
(SEQ ID NO: 59)
MAAFLKMSVSVNFFRPFTRFLVPFTLHRKRNNLTILQRYMSSKIPAVTYPKNE
STPPSEELELDKWKTTMKSSVQEECVSTISSSKDEDPLAATREFIEMWRLLGREVPEHI
TEEELKTLMECVSNTAKKKYLKYLYTKEKVKKARQIKKEMKAAAREEAKNIKLLET
TEEDKQKNFLFLRLWDRNMDIAMGWKGAQAMQFGQPLVFDMAYENYMKRKELQ
NTVSQLLESEGWNRRNVDPFHIYFCNLKIDGALHRELVKRYQEKWDKLLLTSTEKSH
VDLFPKDSIIYLTADSPNVMTTFRHDKVYVIGSFVDKSMQPGTSLAKAKRLNLATEC
LPLDKYLQWEIGNKNLTLDQMIRILLCLKNNGNWQEALQFVPKRKHTGFLEISQHSQ
EFINRLKKAKT
E. coli TrmD
(SEQ ID NO: 18)
MWIGIISLFPEMFRAITDYGVTGRAVKNGLLSIQSWSPRDFTHDRHRTVDDRP
YGGGPGMLMMVQPLRDAIHAAKAAAGEGAKVIYLSPQGRKLDQAGVSELATNQKL
ILVCGRYEGIDERVIQTEIDEEWSIGDYVLSGGELPAMTLIDSVSRFIPGVLGHEASAT
EDSFAEGLLDCPHYTRPEVLEGMEVPPVLLSGNHAEIRRWRLKQSLGRTWLRRPELL
ENLALTEEQARLLAEFKTEHAQQQHKHDGMA
M. Jannaschii Trm5b
(SEQ ID NO: 20)
MPLCLKINKKHGEQTRRILIENNLLNKDYKITSEGNYLYLPIKDVDEDILKSIL
NIEFELVDKELEEKKIIKKPSFREIISKKYRKEIDEGLISLSYDVVGDLVILQISDEVDEK
IRKEIGELAYKLIPCKGVFRRKSEVKGEFRVRELEHLAGENRTLTIHKENGYRLWVDI
AKVYFSPRLGGERARIMKKVSLNDVVVDMFAGVGPFSIACKNAKKIYAIDINPHAIE
LLKKNIKLNKLEHKIIPILSDVREVDVKGNRVIMNLPKFAHKFIDKALDIVEEGGVIHY
YTIGKDFDKAIKLFEKKCDCEVLEKRIVKSYAPREYILALDFKINKK.
P. Abyssi Trm5a
(SEQ ID NO: 21)
MTLAVKVPLKEGEIVRRRLIELGALDNTYKIKREGNFLLIPVKFPVKGFEVVE
AELEQVSRRPNSYREIVNVPQELRRFLPTSFDIIGNIAIIEIPEELKGYAKEIGRAIVEVH
KNVKAVYMKGSKIEGEYRTRELIHIAGENITETIHRENGIRLKLDVAKVYFSPRLATE
RMRVFKMAQEGEVVFDMFAGVGPFSILLAKKAELVFACDINPWAIKYLEENIKLNK
VNNVVPILGDSREIEVKADRIIMNLPKYAHEFLEHAISCINDGGVIHYYGFGPEGDPY
GWHLERIRELANKFGVKVEVLGKRVIRNYAPRQYNIAIDFRVSF

[0229] In various embodiments, the disclosed fusion proteins comprise an adenosine methyltransferase domain that does not comprise an E. coli DNA adenine methyltransferase (Dam). In various embodiments, the disclosed fusion proteins comprise an adenosine methyltransferase domain that does not comprise a variant of an E. coli Dam. In some embodiments, the disclosed fusion proteins comprise an adenosine methyltransferase domain that does not comprise a DNA (cytosine-5)-methyltransferase 1 (or DNMT1), such as a human DNMT1. In some embodiments, the disclosed fusion proteins comprise an adenosine methyltransferase domain that does not comprise a variant of a DNMT1. In some embodiments, the disclosed fusion proteins do not comprise an E. coli DNA adenine methyltransferase, a DNMT1, or a variant thereof.

### III. Additional Base Editor Elements

[0230] In various embodiments, the base editors and constructs encoding the base editors disclosed herein further comprise one or more additional base editor elements, e.g., a nuclear localization signal(s), an inhibitor of base excision repair, and/or a heterologous protein domain.

[0231] In various embodiments, the base editors and constructs encoding the base editors disclosed herein further comprise one or more, preferably, at least two nuclear localization signals. In certain embodiments, the base editors comprise at least two NLSs. In embodiments with at least two NLSs, the NLSs can be the same NLSs or they can be different NLSs. In addition, the NLSs may be expressed as part of a fusion protein with the remaining portions of the base editors. In some embodiments, one or more of the NLSs are bipartite NLSs (“bpNLS”). In certain embodiments, the disclosed fusion proteins comprise two bipartite NLSs. In some embodiments, the disclosed fusion proteins comprise more than two bipartite NLSs.

[0232] The location of the NLS fusion can be at the N-terminus, the C-terminus, or within a sequence of a base editor (e.g., inserted between the encoded napDNAbp component (e.g., Cas9) and a DNA nucleobase modification domain (e.g., a adenosine methyltransferase)).

[0233] The NLSs may be any known NLS sequence in the art. The NLSs may also be any future-discovered NLSs for nuclear localization. The NLSs also may be any naturally-occurring NLS, or any non-naturally occurring NLS (e.g., an NLS with one or more desired mutations).

[0234] The term “nuclear localization sequence” or “NLS” refers to an amino acid sequence that promotes import of a protein into the cell nucleus, for example, by nuclear transport. Nuclear localization sequences are known in the art and would be apparent to the skilled artisan. For example, NLS sequences are described in Plank et al., International PCT application PCT/EP2000/011690, filed Nov. 23, 2000, published as WO/2001/038547 on May 31, 2001, the contents of which are incorporated herein by reference. In some embodiments, an NLS comprises the amino acid sequence PKKKRKV (SEQ ID NO: 38), MDSLLMNRRKFLYQFKNVRWAKGRRETYLC (SEQ ID NO: 39), or KRTADGSEFEPKKKRKV (SEQ ID NO: 7). In other embodiments, NLS comprises the amino acid sequences NLSKRPAAIKKAGQAKKKK (SEQ ID NO: 22), PAAKRVKLD (SEQ ID NO: 23), RQRRNELKRSF (SEQ ID NO: 24), NQSSNFGPMKGGNFGGRSSGPYGGGGQYFAKPRNQGGY (SEQ ID NO: 25).

[0235] In one aspect of the disclosure, a base editor may be modified with one or more nuclear localization signals (NLS), preferably at least two NLSs. In certain embodiments, the base editors are modified with two or more NLSs. The disclosure contemplates the use of any nuclear localization signal known in the art at the time of the disclosure, or any nuclear localization signal that is identified or otherwise made available in the state of the art after the time of the instant filing. A representative nuclear localization signal is a peptide sequence that directs the protein to the nucleus of the cell in which the sequence is expressed. A nuclear localization signal is predominantly basic, can be positioned almost anywhere in a protein's amino acid sequence, generally comprises a short sequence of four amino acids (Autieri & Agrawal, (1998) J. Biol. Chem. 273: 14731-37, incorporated herein by reference) to eight amino acids, and is typically rich in lysine and arginine residues (Magin et al., (2000) Virology 274: 11-16, incorporated herein by reference). Nuclear localization signals often comprise proline residues. A variety of nuclear localization signals have been identified and have been used to effect transport of biological molecules from the cytoplasm to the nucleus of a cell. See, e.g., Tinland et al., (1992) Proc. Natl. Acad. Sci. U.S.A. 89:7442-46; Moede et al., (1999) FEBS Lett. 461:229-34, which is incorporated by reference. Translocation is currently thought to involve nuclear pore proteins.

[0236] Most NLSs can be classified in three general groups: (i) a monopartite NLS exemplified by the SV40 large T antigen NLS (PKKKRKV (SEQ ID NO: 38)); (ii) a bipartite motif consisting of two basic domains separated by a variable number of spacer amino acids and exemplified by the Xenopus nucleoplasmin NLS (KRXXXXXXXXXXKKKL (SEQ ID NO: 41)); and (iii) noncanonical sequences such as M9 of the hnRNP A1 protein, the influenza virus nucleoprotein NLS, and the yeast Gal4 protein NLS (Dingwall and Laskey 1991).

[0237] Nuclear localization signals appear at various points in the amino acid sequences of proteins. NLS's have been identified at the N-terminus, the C-terminus and in the central region of proteins. Thus, the disclosure provides base editors that may be modified with one or more NLSs at the C-terminus, the N-terminus, as well as at in internal region of the base editor. The residues of a longer sequence that do not function as component NLS residues should be selected so as not to interfere, for example topically or sterically, with the nuclear localization signal itself. Therefore, although there are no strict limits on the composition of an NLS-comprising sequence, in practice, such a sequence can be functionally limited in length and composition.

[0238] The present disclosure contemplates any suitable means by which to modify a base editor to include one or more NLSs. In one aspect, the base editors may be engineered to express a base editor protein that is translationally fused at its N-terminus or its C-terminus (or both) to one or more NLSs, i.e., to form a base editor-NLS fusion construct. In other embodiments, the base editor-encoding nucleotide sequence may be genetically modified to incorporate a reading frame that encodes one or more NLSs in an internal region of the encoded base editor. In addition, the NLSs may include various amino acid linkers or spacer regions encoded between the base editor and the N-terminally, C-terminally, or internally-attached NLS amino acid sequence, e.g., and in the central region of proteins. Thus, the present disclosure also provides for nucleotide constructs, vectors, and host cells for expressing fusion proteins that comprise a base editor and one or more NLSs.

[0239] The base editors described herein may also comprise nuclear localization signals which are linked to a base editor through one or more linkers, e.g., and polymeric, amino acid, nucleic acid, polysaccharide, chemical, or nucleic acid linker element. The linkers within the contemplated scope of the disclosure are not intended to have any limitations and can be any suitable type of molecule (e.g., polymer, amino acid, polysaccharide, nucleic acid, lipid, or any synthetic chemical linker domain) and be joined to the base editor by any suitable strategy that effectuates forming a bond (e.g., covalent linkage, hydrogen bonding) between the base editor and the one or more NLSs.

[0240] In certain embodiments, the base editors described herein may comprise an inhibitor of base repair. The term “inhibitor of base repair” or “IBR” refers to a protein that is capable in inhibiting the activity of a nucleic acid repair enzyme, for example a base excision repair enzyme. In some embodiments, the IBR is an inhibitor of OGG base excision repair. In some embodiments, the IBR is an inhibitor of DNA alkylation repair (“iDAR”). Exemplary inhibitors of base repair include inhibitors of APE1, Endo III, Endo IV, Endo V, Endo VIII, Fpg, hOGG1, hNEIL1, T7 EndoI, T4PDG, UDG, hSMUG1, and hAAG. In some embodiments, the IBR is an inhibitor of Endo V or hAAG. In some embodiments, the IBR is an iDAR that may be a catalytically inactive glycosylase or catalytically inactive dioxygenase or a small molecule or peptide inhibitor of adenosine methyltransferase, or variants thereof. In some embodiments, the IBR is an iDAR that may be a TDG inhibitor, MBD4 inhibitor or an inhibitor of an AlkBH enzyme. In some embodiments, the IBR is an iDAR that comprises a catalytically inactive TDG or catalytically inactive MBD4. An exemplary catalytically inactive TDG is an N140A mutant of SEQ ID NO: 60 (human TDG).

[0241] Some exemplary glycosylases are provided below. The catalytically inactivated variants of any of these glycosylase domains are iDARs may be fused to the napDNAbp or adenosine methyltransferase domains of the base editors provided in this disclosure.

OGG (human)
(SEQ ID NO: 61)
MPARALLPRRMGHRTLASTPALWASIPCPRSELRLDLVLPSGQSFRWREQ
SPAHWSGVLADQVWTLTQTEEQLHCTVYRGDKSQASRPTPDELEAVRKYF
QLDVTLAQLYHHWGSVDSHFQEVAQKFQGVRLLRQDPIECLFSFICSSNN
NIARITGMVERLCQAFGPRLIQLDDVTYHGFPSLQALAGPEVEAHLRKLG
LGYRARYVSASARAILEEQGGLAWLQQLRESSYEEAHKALCILPGVGTKV
ADCICLMALDKPQAVPVDVHMWHIAQRDYSWHPTTSQAKGPSPQTNKELG
NFFRSLWGPYAGWAQAVLFSADLRQSRHAQEPPAKRRKGSKGPEG
MPG (human)
(SEQ ID NO: 62)
MVTPALQMKKPKQFCRRMGQKKQRPARAGQPHSSSDAAQAPAEQPHSSSD
AAQAPCPRERCLGPPTTPGPYRSIYFSSPKGHLTRLGLEFFDQPAVPLAR
AFLGQVLVRRLPNGTELRGRIVETEAYLGPEDEAAHSRGGRQTPRNRGMF
MKPGTLYVYIIYGMYFCMNISSQGDGACVLLRALEPLEGLETMRQLRSTL
RKGTASRVLKDRELCSGPSKLCQALAINKSFDQRDLAQDEAVWLERGPLE
PSEPAVVAAARVGVGHAGEWARKPLRFYVRGSPWVSVVDRVAEQDTQA
MBD4 (human)
(SEQ ID NO: 63)
MGTTGLESLSLGDRGAAPTVTSSERLVPDPPNDLRKEDVAMELERVGEDE
EQMMIKRSSECNPLLQEPIASAQFGATAGTECRKSVPCGWERVVKQRLFG
KTAGRFDVYFISPQGLKFRSKSSLANYLHKNGETSLKPEDFDFTVLSKRG
IKSRYKDCSMAALTSHLQNQSNNSNWNLRTRSKCKKDVFMPPSSSSELQE
SRGLSNFTSTHLLLKEDEGVDDVNFRKVRKPKGKVTILKGIPIKKTKKGC
RKSCSGFVQSDSKRESVCNKADAESEPVAQKSQLDRTVCISDAGACGETL
SVTSEENSLVKKKERSLSSGSNFCSEQKTSGIINKFCSAKDSEHNEKYED
TFLESEEIGTKVEVVERKEHLHTDILKRGSEMDNNCSPTRKDFTGEKIFQ
EDTIPRTQIERRKTSLYFSSKYNKEALSPPRRKAFKKWTPPRSPFNLVQE
TLFHDPWKLLIATIFLNRTSGKMAIPVLWKFLEKYPSAEVARTADWRDVS
ELLKPLGLYDLRAKTIVKFSDEYLTKQWKYPIELHGIGKYGNDSYRIFCV
NEWKQVHPEDHKLNKYHDWLWENHEKLSLS
TDG (human)
(SEQ ID NO: 60)
MEAENAGSYSLQQAQAFYTFPFQQLMAEAPNMAVVNEQQMPEEVPAPAPA
QEPVQEAPKGRKRKPRTTEPKQPVEPKKPVESKKSGKSAKSKEKQEKITD
TFKVKRKVDRFNGVSEAELLTKTLPDILTFNLDIVIIGINPGLMAAYKGH
HYPGPGNHFWKCLFMSGLSEVQLNHMDDHTLPGKYGIGFTNMVERTTPGS
KDLSSKEFREGGRILVQKLQKYQPRIAVFNGKCIYEIFSKEVFGVKVKNL
EFGLQPHKIPDTETLCYVMPSSSARCAQFPRAQDKVHYYIKLKDLRDQLK
GIERNMDVQEVQYTFDLQLAQEDAKKMAVKEEKYDPGYEAAYGGAYGENP
CSSEPCGFSSNGLIESVELRGESAFSGIPNGQWMTQSFTDQIPSFSNHCG
TQEQEEESHA

[0242] In some embodiments, the base editor described herein may comprise one or more heterologous protein domains (e.g., about or more than about 1, 2, 3, 4, 5, 6, 7, 8, 9, 10, or more domains in addition to the base editor components). A base editor may comprise any additional protein sequence, and optionally a linker sequence between any two domains. Other exemplary features that may be present are localization sequences, such as cytoplasmic localization sequences, export sequences, such as nuclear export sequences, or other localization sequences, as well as sequence tags that are useful for solubilization, purification, or detection of the fusion proteins.

[0243] Examples of protein domains that may be fused to a base editor or component thereof (e.g., the napDNAbp domain, the nucleobase modification domain, or the NLS domain) include, without limitation, epitope tags, and reporter gene sequences. Non-limiting examples of epitope tags include histidine (His) tags, V5 tags, FLAG tags, influenza hemagglutinin (HA) tags, Myc tags, VSV-G tags, and thioredoxin (Trx) tags. Examples of reporter genes include, but are not limited to, glutathione-5-transferase (GST), horseradish peroxidase (HRP), chloramphenicol acetyltransferase (CAT), beta-galactosidase, beta-glucuronidase, luciferase, green fluorescent protein (GFP), HcRed, DsRed, cyan fluorescent protein (CFP), yellow fluorescent protein (YFP), and autofluorescent proteins including blue fluorescent protein (BFP). A base editor may be fused to a gene sequence encoding a protein or a fragment of a protein that bind DNA molecules or bind other cellular molecules, including, but not limited to, maltose binding protein (MBP), S-tag, Lex A DNA binding domain (DBD) fusions, GAL4 DNA binding domain fusions, and herpes simplex virus (HSV) BP16 protein fusions. Additional domains that may form part of a base editor are described in US Patent Publication No. 2011/0059502, published Mar. 10, 2011 and incorporated herein by reference in its entirety.

[0244] In an aspect of the disclosure, a reporter gene which includes, but is not limited to, glutathione-5-transferase (GST), horseradish peroxidase (HRP), chloramphenicol acetyltransferase (CAT) beta-galactosidase, beta-glucuronidase, luciferase, green fluorescent protein (GFP), HcRed, DsRed, cyan fluorescent protein (CFP), yellow fluorescent protein (YFP), and autofluorescent proteins including blue fluorescent protein (BFP), may be introduced into a cell to encode a gene product which serves as a marker by which to measure the alteration or modification of expression of the gene product. In certain embodiments of the disclosure the gene product is luciferase. In a further embodiment of the disclosure the expression of the gene product is decreased.

[0245] Suitable protein tags provided herein include, but are not limited to, biotin carboxylase carrier protein (BCCP) tags, myc-tags, calmodulin-tags, FLAG-tags, hemagglutinin (HA)-tags, polyhistidine tags, also referred to as histidine tags or His-tags, maltose binding protein (MBP)-tags, nus-tags, glutathione-S-transferase (GST)-tags, green fluorescent protein (GFP)-tags, thioredoxin-tags, S-tags, Softags (e.g., Softag 1, Softag 3), strep-tags, biotin ligase tags, FlAsH tags, V5 tags, and SBP-tags. Additional suitable sequences will be apparent to those of skill in the art. In some embodiments, the fusion protein comprises one or more His tags.

### IV. Linkers

[0246] In certain embodiments, linkers may be used to link any of the peptides or peptide domains or domains of the disclosure (e.g., domain A covalently linked to domain B which is covalently linked to domain C).

[0247] As defined above, the term “linker,” as used herein, refers to a chemical group or a molecule linking two molecules or domains, e.g., a binding domain and a cleavage domain of a nuclease. In some embodiments, a linker joins a gRNA binding domain of a napDNAbp nuclease and the catalytic domain of a recombinase. In some embodiments, a linker joins a dCas9 and base editor domain (e.g., a adenosine methyltransferase). Typically, the linker is positioned between, or flanked by, two groups, molecules, or other domains and connected to each one via a covalent bond, thus connecting the two. In some embodiments, the linker is an amino acid or a plurality of amino acids (e.g., a peptide or protein). In some embodiments, the linker is an organic molecule, group, polymer, or chemical domain. Chemical domains include, but are not limited to, disulfide, hydrazone, thiol and azo domains. In some embodiments, the linker is 5-100 amino acids in length, for example, 5, 6, 7, 8, 9, 10, 11, 12, 13, 14, 15, 16, 17, 18, 19, 20, 21, 22, 23, 24, 25, 26, 27, 28, 29, 30, 30-35, 35-40, 40-45, 45-50, 50-60, 60-70, 70-80, 80-90, 90-100, 100-150, or 150-200 amino acids in length. In some embodiments, the linker is a single atom, or a single angstrom, in length. Longer or shorter linkers are also contemplated.

[0248] The linker may be as simple as a covalent bond, or it may be a polymeric linker many atoms in length. In certain embodiments, the linker is a polypeptide or based on amino acids. In other embodiments, the linker is not peptide-like. In certain embodiments, the linker is a covalent bond (e.g., a carbon-carbon bond, disulfide bond, carbon-heteroatom bond, etc.). In certain embodiments, the linker is a carbon-nitrogen bond of an amide linkage. In certain embodiments, the linker is a cyclic or acyclic, substituted or unsubstituted, branched or unbranched aliphatic or heteroaliphatic linker. In certain embodiments, the linker is polymeric (e.g., polyethylene, polyethylene glycol, polyamide, polyester, etc.). In certain embodiments, the linker comprises a monomer, dimer, or polymer of aminoalkanoic acid. In certain embodiments, the linker comprises an aminoalkanoic acid (e.g., glycine, ethanoic acid, alanine, beta-alanine, 3-aminopropanoic acid, 4-aminobutanoic acid, 5-pentanoic acid, etc.). In certain embodiments, the linker comprises a monomer, dimer, or polymer of aminohexanoic acid (Ahx). In certain embodiments, the linker is based on a carbocyclic domain (e.g., cyclopentane, cyclohexane). In other embodiments, the linker comprises a polyethylene glycol domain (PEG). In other embodiments, the linker comprises amino acids. In certain embodiments, the linker comprises a peptide. In certain embodiments, the linker comprises an aryl or heteroaryl domain. In certain embodiments, the linker is based on a phenyl ring. The linker may included functionalized domains to facilitate attachment of a nucleophile (e.g., thiol, amino) from the peptide to the linker. Any electrophile may be used as part of the linker. Exemplary electrophiles include, but are not limited to, activated esters, activated amides, Michael acceptors, alkyl halides, aryl halides, acyl halides, and isothiocyanates.

[0249] In some other embodiments, the linker comprises the amino acid sequence (GGGGS)ₙ (SEQ ID NO: 49), (G)ₙ (SEQ ID NO: 50), (EAAAK)ₙ (SEQ ID NO: 51), (GGS)ₙ (SEQ ID NO: 52), (SGGS)ₙ (SEQ ID NO: 53), (XP)ₙ (SEQ ID NO: 54), or any combination thereof, wherein n is independently an integer between 1 and 30, and wherein X is any amino acid. In some embodiments, the linker comprises the amino acid sequence (GGS)ₙ (SEQ ID NO: 40), wherein n is 1, 3, or 7. In some embodiments, the linker comprises the amino acid sequence SGSETPGTSESATPES (SEQ ID NO: 55). In some embodiments, the linker comprises the amino acid sequence SGGSSGGSSGSETPGTSESATPESSGGSSGGS (SEQ ID NO: 5), also known as an XTEN linker. In some embodiments, the linker comprises the amino acid sequence SGGSGGSGGS (SEQ ID NO: 6). In some embodiments, the linker comprises the amino acid sequence SGGS (SEQ ID NO: 8).

[0250] In some embodiments, the fusion protein comprises the structure [adenosine methyltransferase]-[optional linker sequence]-[dCas9 or Cas9 nickase]-[optional linker sequence]-[iDAR]. In other embodiments, the fusion protein comprises the structure [adenosine methyltransferase]-[optional linker sequence]-[iDAR]-[optional linker sequence]-[dCas9 or Cas9 nickase]; [iDAR]-[optional linker sequence]-[adenosine methyltransferase]-[optional linker sequence]-[dCas9 or Cas9 nickase]; [iDAR]-[optional linker sequence]-[dCas9 or Cas9 nickase]-[optional linker sequence]-[adenosine methyltransferase]; [dCas9 or Cas9 nickase]-[optional linker sequence]-[iDAR]-[optional linker sequence]-[adenosine methyltransferase]; or [dCas9 or Cas9 nickase]-[optional linker sequence]-[adenosine methyltransferase]-[optional linker sequence]-[iDAR].

### Reduced Off-Target Effects

[0251] In some embodiments, the target nucleotide sequence is a DNA sequence in a genome, e.g. a eukaryotic genome. In certain embodiments, the target nucleotide sequence is in a mammalian (e.g. a human) genome. In certain embodiments, the target nucleotide sequence is in a human genome. In other embodiments, the target nucleotide sequence is in the genome of a rodent, such as a mouse or rate. In other embodiments, the target nucleotide sequence is in the genome of a domesticated animal, such as a horse, cat, dog, or rabbit.

[0252] Some embodiments of the disclosure are based on the recognition that any of the fusion proteins provided herein are capable of modifying a specific nucleobase without generating a significant proportion of indels. An “indel”, as used herein, refers to the insertion or deletion of a nucleobase within a nucleic acid. Such insertions or deletions can lead to frame shift mutations within a coding region of a gene. In some embodiments, it is desirable to generate fusion proteins that efficiently modify (e.g. methylate) a specific nucleotide within a nucleic acid, without generating a large number of insertions or deletions (i.e., indels) in the nucleic acid. In certain embodiments, any of the fusion proteins provided herein are capable of generating a greater proportion of intended modifications (e.g., point mutations) versus indels.

[0253] In some embodiments, the fusion proteins provided herein are capable of generating a ratio of intended point mutations to indels that is greater than 1:1. In some embodiments, the fusion proteins provided herein are capable of generating a ratio of intended point mutations to indels that is at least 1.5:1, at least 2:1, at least 2.5:1, at least 3:1, at least 3.5:1, at least 4:1, at least 4.5:1, at least 5:1, at least 5.5:1, at least 6:1, at least 6.5:1, at least 7:1, at least 7.5:1, at least 8:1, at least 10:1, at least 12:1, at least 15:1, at least 20:1, at least 25:1, at least 30:1, at least 40:1, at least 50:1, at least 100:1, at least 200:1, at least 300:1, at least 400:1, at least 500:1, at least 600:1, at least 700:1, at least 800:1, at least 900:1, or at least 1000:1, or more. The number of intended mutations and indels may be determined using any suitable method, for example the methods used in the below Examples. In some embodiments, to calculate indel frequencies, sequencing reads are scanned for exact matches to two 10-bp sequences that flank both sides of a window in which indels might occur. If no exact matches are located, the read is excluded from analysis. If the length of this indel window exactly matches the reference sequence the read is classified as not containing an indel. If the indel window is two or more bases longer or shorter than the reference sequence, then the sequencing read is classified as an insertion or deletion, respectively.

[0254] In some embodiments, the fusion proteins provided herein are capable of limiting formation of indels in a region of a nucleic acid. In some embodiments, the region is at a nucleotide targeted by a fusion protein or a region within 2, 3, 4, 5, 6, 7, 8, 9, or 10 nucleotides of a nucleotide targeted by a fusion protein. In some embodiments, any of the fusion proteins provided herein are capable of limiting the formation of indels at a region of a nucleic acid to less than 1%, less than 1.5%, less than 2%, less than 2.5%, less than 3%, less than 3.5%, less than 4%, less than 4.5%, less than 5%, less than 6%, less than 7%, less than 8%, less than 9%, less than 10%, less than 12%, less than 15%, or less than 20%. The number of indels formed at a nucleic acid region may depend on the amount of time a nucleic acid (e.g., a nucleic acid within the genome of a cell) is exposed to a fusion protein. In some embodiments, an number or proportion of indels is determined after at least 1 hour, at least 2 hours, at least 6 hours, at least 12 hours, at least 24 hours, at least 36 hours, at least 48 hours, at least 3 days, at least 4 days, at least 5 days, at least 7 days, at least 10 days, or at least 14 days of exposing a nucleic acid (e.g., a nucleic acid within the genome of a cell) to a fusion protein.

[0255] Some embodiments of the disclosure are based on the recognition that any of the fusion proteins provided herein are capable of efficiently generating an intended mutation, such as a point mutation, in a nucleic acid (e.g. a nucleic acid within a genome of a subject) without generating a significant number of unintended mutations, such as unintended point mutations. In some embodiments, an intended mutation is a mutation that is generated by a specific fusion protein bound to a gRNA, specifically designed to generate the intended mutation. In some embodiments, the intended mutation is a mutation associated with a disease, disorder, or condition. In some embodiments, the intended mutation is the correction of a thymine (T) to adenine (A) point mutation associated with a disease, disorder, or condition. In some embodiments, the intended mutation is the correction of an adenine (A) to thymine (T) point mutation associated with a disease, disorder, or condition. In some embodiments, the intended mutation is the correction of a thymine (T) to adenine (A) point mutation within the coding region of a gene. In some embodiments, the intended mutation is the correction of an adenine (A) to thymine (T) point mutation within the coding region of a gene. In some embodiments, the intended mutation is a point mutation that generates a stop codon, for example, a premature stop codon within the coding region of a gene. In some embodiments, the intended mutation is a mutation that eliminates a stop codon. In some embodiments, the intended mutation is a mutation that alters the splicing of a gene. In some embodiments, the intended mutation is a mutation that alters the regulatory sequence of a gene (e.g., a gene promotor or gene repressor). In some embodiments, any of the fusion proteins provided herein are capable of generating a ratio of intended mutations to unintended mutations (e.g., intended point mutations:unintended point mutations) that is greater than 1:1. In some embodiments, any of the fusion proteins provided herein are capable of generating a ratio of intended mutations to unintended mutations (e.g., intended point mutations:unintended point mutations) that is at least 1.5:1, at least 2:1, at least 2.5:1, at least 3:1, at least 3.5:1, at least 4:1, at least 4.5:1, at least 5:1, at least 5.5:1, at least 6:1, at least 6.5:1, at least 7:1, at least 7.5:1, at least 8:1, at least 10:1, at least 12:1, at least 15:1, at least 20:1, at least 25:1, at least 30:1, at least 40:1, at least 50:1, at least 100:1, at least 150:1, at least 200:1, at least 250:1, at least 500:1, or at least 1000:1, or more.

[0256] Some embodiments of the disclosure are based on the recognition that the formation of indels in a region of a nucleic acid may be limited by nicking the non-edited strand opposite to the strand in which edits are introduced. This nick serves to direct mismatch repair machinery to the non-edited strand, ensuring that the chemically modified nucleobase is not interpreted as a lesion by the machinery. This nick may be created by the use of an nCas9. The methods provided in this disclosure comprise cutting (or nicking) the non-edited strand of the double-stranded DNA, for example, wherein the one strand comprises the A of the target T:A nucleobase pair, or the T of the T:A nucleobase pair.

### Guide Sequences (e.g., Guide RNAs)

[0257] The present disclosure further provides guide RNAs for use in accordance with the disclosed methods of editing. The disclosure provides guide RNAs that are designed to recognize target sequences. Such gRNAs may be designed to have guide sequences (or “spacers”) having complementarity to a protospacer within the target sequence. Guide RNAs are also provided for use with one or more of the disclosed fusion proteins, e.g., in the disclosed methods of editing a nucleic acid molecule. Such gRNAs may be designed to have guide sequences having complementarity to a protospacer within a target sequence to be edited, and to have backbone sequences that interact specifically with the napDNAbp domains of any of the disclosed base editors, such as Cas9 nickase domains of the disclosed base editors.

[0258] In various embodiments, the ATBEs may be complexed, bound, or otherwise associated with (e.g., via any type of covalent or non-covalent bond) one or more guide sequences, i.e., the sequence which becomes associated or bound to the base editor and directs its localization to a specific target sequence having complementarity to the guide sequence or a portion thereof. The particular design embodiments of a guide sequence will depend upon the nucleotide sequence of a genomic target site of interest (i.e., the desired site to be edited) and the type of napDNAbp (e.g., type of Cas protein) present in the base editor, among other factors, such as PAM sequence locations, percent G/C content in the target sequence, the degree of microhomology regions, secondary structures, etc.

[0259] In general, a guide sequence is any polynucleotide sequence having sufficient complementarity with a target polynucleotide sequence to hybridize with the target sequence and direct sequence-specific binding of a napDNAbp (e.g., a Cas9, Cas9 homolog, or Cas9 variant) to the target sequence. In some embodiments, the degree of complementarity between a guide sequence and its corresponding target sequence, when optimally aligned using a suitable alignment algorithm, is about or more than about 50%, 60%, 75%, 80%, 85%, 90%, 95%, 97.5%, 99%, or more. Optimal alignment may be determined with the use of any suitable algorithm for aligning sequences, non-limiting example of which include the Smith-Waterman algorithm, the Needleman-Wunsch algorithm, algorithms based on the Burrows-Wheeler Transform (e.g. the Burrows Wheeler Aligner), ClustalW, Clustal X, BLAT, Novoalign (Novocraft Technologies, ELAND (Illumina, San Diego, Calif.), SOAP (available at soap.genomics.org.cn), and Maq (available at maq.sourceforge.net). In some embodiments, a guide sequence is about or more than about 5, 10, 11, 12, 13, 14, 15, 16, 17, 18, 19, 20, 21, 22, 23, 24, 25, 26, 27, 28, 29, 30, 35, 40, 45, 50, 75, or more nucleotides in length.

[0260] In some embodiments, a guide sequence is less than about 75, 50, 45, 40, 35, 30, 25, 20, 15, 12, or fewer nucleotides in length. The ability of a guide sequence to direct sequence-specific binding of a base editor to a target sequence may be assessed by any suitable assay. For example, the components of a base editor, including the guide sequence to be tested, may be provided to a host cell having the corresponding target sequence, such as by transfection with vectors encoding the components of a base editor disclosed herein, followed by an assessment of preferential cleavage within the target sequence, such as by Surveyor assay as described herein. Similarly, cleavage of a target polynucleotide sequence may be evaluated in a test tube by providing the target sequence, components of a base editor, including the guide sequence to be tested and a control guide sequence different from the test guide sequence, and comparing binding or rate of cleavage at the target sequence between the test and control guide sequence reactions. Other assays are possible, and will occur to those skilled in the art.

[0261] A guide sequence may be selected to target any target sequence. In some embodiments, the target sequence is a sequence within a genome of a cell. Exemplary target sequences include those that are unique in the target genome. For example, for the S. pyogenes Cas9, a unique target sequence in a genome may include a Cas9 target site of the form MMMMMMMMNNNNNNNNNNNNXGG (SEQ ID NO: 26) where NNNNNNNNNNNNXGG (N is A, G, T, or C; and X can be anything) (SEQ ID NO: 27) has a single occurrence in the genome. A unique target sequence in a genome may include an S. pyogenes Cas9 target site of the form MMMMMMMMMNNNNNNNNNNNXGG (SEQ ID NO: 28) where NNNNNNNNNNNXGG (N is A, G, T, or C; and X can be anything) (SEQ ID NO: 29) has a single occurrence in the genome. For the S. thermophilus CRISPR1Cas9, a unique target sequence in a genome may include a Cas9 target site of the form MMMMMMMMNNNNNNNNNNNNXXAGAAW (SEQ ID NO: 30) where NNNNNNNNNNNNXXAGAAW (N is A, G, T, or C; X can be anything; and W is A or T) (SEQ ID NO: 31) has a single occurrence in the genome. A unique target sequence in a genome may include an S. thermophilus CRISPR 1 Cas9 target site of the form MMMMMMMMMNNNNNNNNNNNXXAGAAW (SEQ ID NO: 32) where NNNNNNNNNNNXXAGAAW (N is A, G, T, or C; X can be anything; and W is A or T) (SEQ ID NO: 33) has a single occurrence in the genome. For the S. pyogenes Cas9, a unique target sequence in a genome may include a Cas9 target site of the form MMMMMMMMNNNNNNNNNNNNXGGXG (SEQ ID NO: 34) where NNNNNNNNNNNNXGGXG (N is A, G, T, or C; and X can be anything) (SEQ ID NO: 35) has a single occurrence in the genome. A unique target sequence in a genome may include an S. pyogenes Cas9 target site of the form MMMMMMMMMNNNNNNNNNNNXGGXG (SEQ ID NO: 36) where NNNNNNNNNNNXGGXG (N is A, G, T, or C; and X can be anything) (SEQ ID NO: 37) has a single occurrence in the genome. In each of these sequences “M” may be A, G, T, or C, and need not be considered in identifying a sequence as unique.

[0262] In some embodiments, a guide sequence is selected to reduce the degree of secondary structure within the guide sequence. Secondary structure may be determined by any suitable polynucleotide folding algorithm. Some programs are based on calculating the minimal Gibbs free energy. An example of one such algorithm is mFold, as described by Zuker & Stiegler (Nucleic Acids Res. 9 (1981), 133-148). Another example folding algorithm is the online webserver RNAfold, developed at Institute for Theoretical Chemistry at the University of Vienna, using the centroid structure prediction algorithm (see, e.g., A. R. Gruber et al., 2008, Cell 106(1): 23-24; and P A Carr & G M Church, 2009, Nature Biotechnology 27(12): 1151-62). Additional algorithms may be found in Chuai, G. et al., DeepCRISPR: optimized CRISPR guide RNA design by deep learning, Genome Biol. 19:80 (2018), and U.S. application Ser. No. 61/836,080 and U.S. Pat. No. 8,871,445, issued Oct. 28, 2014, the entireties of each of which are incorporated herein by reference.

[0263] In general, a tracr mate sequence includes any sequence that has sufficient complementarity with a tracr sequence to promote one or more of: (1) excision of a guide sequence flanked by tracr mate sequences in a cell containing the corresponding tracr sequence; and (2) formation of a complex at a target sequence, wherein the complex comprises the tracr mate sequence hybridized to the tracr sequence. In general, degree of complementarity is with reference to the optimal alignment of the tracr mate sequence and tracr sequence, along the length of the shorter of the two sequences. Optimal alignment may be determined by any suitable alignment algorithm, and may further account for secondary structures, such as self-complementarity within either the tracr sequence or tracr mate sequence. In some embodiments, the degree of complementarity between the tracr sequence and tracr mate sequence along the length of the shorter of the two when optimally aligned is about or more than about 25%, 30%, 40%, 50%, 60%, 70%, 80%, 90%, 95%, 97.5%, 99%, or higher. In some embodiments, the tracr sequence is about or more than about 5, 6, 7, 8, 9, 10, 11, 12, 13, 14, 15, 16, 17, 18, 19, 20, 25, 30, 40, 50, or more nucleotides in length. In some embodiments, the tracr sequence and tracr mate sequence are contained within a single transcript, such that hybridization between the two produces a transcript having a secondary structure, such as a hairpin. Preferred loop forming sequences for use in hairpin structures are four nucleotides in length, and most preferably have the sequence GAAA. However, longer or shorter loop sequences may be used, as may alternative sequences. The sequences preferably include a nucleotide triplet (for example, AAA), and an additional nucleotide (for example C or G). Examples of loop forming sequences include CAAA and AAAG. In an embodiment of the disclosure, the transcript or transcribed polynucleotide sequence has at least two or more hairpins. In certain embodiments, the transcript has two, three, four or five hairpins. In a further embodiment of the disclosure, the transcript has at most five hairpins. In some embodiments, the single transcript further includes a transcription termination sequence; preferably this is a polyT sequence, for example six T nucleotides. Further non-limiting examples of single polynucleotides comprising a guide sequence, a tracr mate sequence, and a tracr sequence are as follows (listed 5′ to 3′), where “N” represents a base of a guide sequence, the first block of lower case letters represent the tracr mate sequence, and the second block of lower case letters represent the tracr sequence, and the final poly-T sequence represents the transcription terminator:

(1)
(SEQ ID NO: 42)
NNNNNNNNgtttttgtactctcaagatttaGAAAtaaatcttgcagaagc
tacaaagataaggcttcatgccgaaatcaacaccctgtcattttatggca
gggtgttttcgttatttaaTTTTTT;
(2)
(SEQ ID NO: 43)
NNNNNNNNNNNNNNNNNNgtttttgtactctcaGAAAtgcagaagctaca
aagataaggcttcatgccgaaatcaacaccctgtcattttatggcagggt
gttttcgttatttaaTTTTTT;
(3)
(SEQ ID NO: 44)
NNNNNNNNNNNNNNNNNNNNgtttttgtactctcaGAAAtgcagaagcta
caaagataaggcttcatgccgaaatca acaccctgtcattttatggcag
ggtgtTTTTT;
(4)
(SEQ ID NO: 45)
NNNNNNNNNNNNNNNNNNNNgttttagagctaGAAAtagcaagttaaaat
aaggctagtccgttatcaacttgaaaa agtggcaccgagtcggtgcTTT
TTT;
(5)
(SEQ ID NO: 46)
NNNNNNNNNNNNNNNNNNNNgttttagagctaGAAATAGcaagttaaaat
aaggctagtccgttatcaacttgaa aaagtgTTTTTTT;
and
(6)
(SEQ ID NO: 47)
NNNNNNNNNNNNNNNNNNNNgttttagagctagAAATAGcaagttaaaat
aaggctagtccgttatcaTTTTT TTT.

[0264] In some embodiments, sequences (1) to (3) are used in combination with Cas9 from S. thermophilus CRISPR1. In some embodiments, sequences (4) to (6) are used in combination with Cas9 from S. pyogenes. In some embodiments, the tracr sequence is a separate transcript from a transcript comprising the tracr mate sequence.

[0265] It will be apparent to those of skill in the art that in order to target any of the fusion proteins comprising a Cas9 domain and a methyltransferase, as disclosed herein, to a target site, e.g., a site comprising a point mutation to be edited, it is typically necessary to co-express the fusion protein together with a guide RNA, e.g., an sgRNA. As explained in more detail elsewhere herein, a guide RNA typically comprises a tracrRNA framework allowing for Cas9 binding, and a guide sequence, which confers sequence specificity to the Cas9:nucleic acid editing enzyme/domain fusion protein.

[0266] In some embodiments, the guide RNAs for use in accordance with the disclosed methods of editing comprise a backbone structure that is recognized by an S. pyogenes Cas9 protein or domain, such as an SpCas9 domain of the disclosed base editors. The backbone structure recognized by an SpCas9 protein may comprise the sequence 5′-[guide sequence]-guuuuagagcuagaaauagcaaguuaaaauaaggcuaguccguuaucaacuugaaaaaguggcaccgagucggugcuuu uu-3′ (SEQ ID NO: 48), wherein the guide sequence comprises a sequence that is complementary to the protospacer of the target sequence. See U.S. Publication No. 2015/0166981, published Jun. 18, 2015, the disclosure of which is incorporated by reference herein. The guide sequence is typically 20 nucleotides long.

[0267] In other embodiments, the guide RNAs for use in accordance with the disclosed methods of editing comprise a backbone structure that is recognized by an S. aureus Cas9 protein. The backbone structure recognized by an SaCas9 protein may comprise the sequence 5′-[guide sequence]-guuuuaguacucuguaaugaaaauuacagaaucuacuaaaacaaggcaaaaugccguguuuaucucgucaacuuguugg cgagauuuuuuu-3′ (SEQ ID NO: 141).

[0268] The sequences of suitable guide RNAs for targeting the disclosed fusion proteins to specific genomic target sites will be apparent to those of skill in the art based on the instant disclosure. Such suitable guide RNA sequences typically comprise guide sequences that are complementary to a nucleic sequence within 50 nucleotides upstream or downstream of the target nucleotide to be edited. Some exemplary guide RNA sequences suitable for targeting any of the provided fusion proteins to specific target sequences are provided herein. Additional guide sequences are are well known in the art and can be used with the base editors described herein. Additional exemplary guide sequences are disclosed in, for example, Jinek M., et al., Science 337:816-821(2012); Mali P, Esvelt K M & Church G M (2013) Cas9 as a versatile tool for engineering biology, Nature Methods, 10, 957-963; Li J F et al., (2013) Multiplex and homologous recombination-mediated genome editing in Arabidopsis and Nicotiana benthamiana using guide RNA and Cas9, Nature Biotechnology, 31, 688-691; Hwang, W. Y. et al., Efficient genome editing in zebrafish using a CRISPR-Cas system, Nature Biotechnology 31, 227-229 (2013); Cong L et al., (2013) Multiplex genome engineering using CRIPSR/Cas systems, Science, 339, 819-823; Cho S W et al., (2013) Targeted genome engineering in human cells with the Cas9 RNA-guided endonuclease, Nature Biotechnology, 31, 230-232; Jinek, M. et al., RNA-programmed genome editing in human cells, eLife 2, e00471 (2013); Dicarlo, J. E. et al., Genome engineering in Saccharomyces cerevisiae using CRISPR-Cas systems. Nucleic Acid Res. (2013); Briner A E et al., (2014) Guide RNA functional modules direct Cas9 activity and orthogonality, Mol Cell, 56, 333-339, the entire contents of each of which are herein incorporated by reference.

### Methods for Making Fusion Proteins

[0269] The disclosure further relates in various aspects to methods of making the disclosed fusion proteins by various modes of manipulation that include, but are not limited to, codon optimization to achieve greater expression levels in a cell, and the use of nuclear localization sequences (NLSs), preferably at least two NLSs, e.g., two bipartite NLSs, to increase the localization of the expressed fusion proteins into a cell nucleus.

[0270] The fusion proteins contemplated herein can include modifications that result in increased expression, for example, through codon optimization.

[0271] In some embodiments, the fusion proteins (or a component thereof) is codon optimized for expression in particular cells, such as eukaryotic cells. The eukaryotic cells may be those of or derived from a particular organism, such as a mammal, including, but not limited to, human, mouse, rat, rabbit, dog, or non-human primate. In general, codon optimization refers to a process of modifying a nucleic acid sequence for enhanced expression in the host cells of interest by replacing at least one codon (e.g. about or more than about 1, 2, 3, 4, 5, 10, 15, 20, 25, 50, or more codons) of the native sequence with codons that are more frequently or most frequently used in the genes of that host cell while maintaining the native amino acid sequence. Various species exhibit particular bias for certain codons of a particular amino acid. Codon bias (differences in codon usage between organisms) often correlates with the efficiency of translation of messenger RNA (mRNA), which is in turn believed to be dependent on, among other things, the properties of the codons being translated and the availability of particular transfer RNA (tRNA) molecules. The predominance of selected tRNAs in a cell is generally a reflection of the codons used most frequently in peptide synthesis. Accordingly, genes can be tailored for optimal gene expression in a given organism based on codon optimization. Codon usage tables are readily available, for example, at the “Codon Usage Database”, and these tables can be adapted in a number of ways. See Nakamura, Y., et al. “Codon usage tabulated from the international DNA sequence databases: status for the year 2000” Nucl. Acids Res. 28:292 (2000). Computer algorithms for codon optimizing a particular sequence for expression in a particular host cell are also available, such as Gene Forge (Aptagen; Jacobus, Pa.), are also available. In some embodiments, one or more codons (e.g. 1, 2, 3, 4, 5, 10, 15, 20, 25, 50, or more, or all codons) in a sequence encoding a CRISPR enzyme correspond to the most frequently used codon for a particular amino acid.

[0272] The above description is meant to be non-limiting with regard to making fusion proteins having increased expression, and thereby increase editing efficiencies.

[0273] Directed Evolution Methods (e.g., PACE or PANCE)

[0274] Various embodiments of the disclosure relate to providing directed evolution methods and systems (e.g., appropriate vectors, cells, phage, flow vessels, etc.) for engineering of the base editors or base editor domains of the present disclosure. The disclosure provides vector systems for the disclosed directed evolution methods to engineer any of the disclosed base editors or base editor domains (e.g., the adenosine methyltransferase domains of any of the disclosed base editors).

[0275] The directed evolution vector systems and methods provided herein allow for a gene of interest (e.g., a base editor- or adenosine methyltransferase-encoding gene) in a viral vector to be evolved over multiple generations of viral life cycles in a flow of host cells to acquire a desired function or activity.

[0276] In PACE, the gene under selection is encoded on the M13 bacteriophage genome. Its activity is linked to M13 propagation by controlling expression of gene III so that only active variants produce infectious progeny phage. Phage are continuously propagated and mutagenized, but mutations accumulate only in the phage genome, not the host or its selection circuit, because fresh host cells are continually flowed into (and out of) the growth vessel, effectively resetting the selection background.

[0277] PACE enables the rapid continuous evolution of biomolecules through many generations of mutation, selection, and replication per day. During PACE, host E. coli cells continuously dilute a population of bacteriophage (selection phage, SP) containing the gene of interest. The gene of interest replaces gene III on the SP, which is required for progeny phage infectivity. SP containing desired gene variants trigger host-cell gene III expression from an accessory plasmid (AP). Host-cell DNA plasmids encode a genetic circuit that links the desired activity of the protein encoded in the SP to the expression of gene III on the AP. Thus, SP variants containing desired gene variants can propagate, while phage encoding inactive variants do not generate infectious progeny and are rapidly diluted out of the culture vessel (or lagoon). An arabinose-inducible mutagenesis plasmid (MP) controls the phage mutation rate.

[0278] The key to new PACE selections is linking gene III expression to the activity of interest. A low stringency selection was designed in which base editing activates T7 RNA polymerase, which transcribes gIII. A single editing event can lead to high output amplification immediately upon transcription of the edited DNA. Reference is made to International Patent Publication WO 2019/023680, published Jan. 31, 2019; Badran, A. H. & Liu, D. R. In vivo continuous directed evolution. Curr. Opin. Chem. Biol. 24, 1-10 (2015); Dickinson, B. C., Packer, M. S., Badran, A. H. & Liu, D. R. A system for the continuous directed evolution of proteases rapidly reveals drug-resistance mutations. Nat. Commun. 5, 5352 (2014); Hubbard, B. P. et al. Continuous directed evolution of DNA-binding proteins to improve TALEN specificity. Nat. Methods 12, 939-942 (2015); Wang, T., Badran, A. H., Huang, T. P. & Liu, D. R. Continuous directed evolution of proteins with improved soluble expression. Nat. Chem. Biol. 14, 972-980 (2018), and Thuronyi, B. W. et al. Continuous evolution of base editors with expanded target compatibility and improved activity. Nat. Biotechnol., 1070-1079 (2019), each of which is herein incorporated by reference.

[0279] In some embodiments, the viral vector or the phage is a filamentous phage, for example, an M13 phage, such as an M13 selection phage as described in more detail elsewhere herein. In some such embodiments, the gene required for the production of infectious viral particles is the M13 gene III (gIII).

[0280] In some embodiments, the viral vector infects mammalian cells. In some embodiments, the viral vector is a retroviral vector. In some embodiments, the viral vector is a vesicular stomatitis virus (VSV) vector. As a dsRNA virus, VSV has a high mutation rate, and can carry cargo, including a gene of interest, of up to 4.5 kb in length. The generation of infectious VSV particles requires the envelope protein VSV-G, a viral glycoprotein that mediates phosphatidylserine attachment and cell entry. VSV can infect a broad spectrum of host cells, including mammalian and insect cells. VSV is therefore a highly suitable vector for continuous evolution in human, mouse, or insect host cells. Similarly, other retroviral vectors that can be pseudotyped with VSV-G envelope protein are equally suitable for continuous evolution processes as described herein.

[0281] It is known to those of skill in the art that many retroviral vectors, for example, Murine Leukemia Virus vectors, or Lentiviral vectors can efficiently be packaged with VSV-G envelope protein as a substitute for the virus's native envelope protein. In some embodiments, such VSV-G packagable vectors are adapted for use in a continuous evolution system in that the native envelope (env) protein (e.g., VSV-G in VSVS vectors, or env in MLV vectors) is deleted from the viral genome, and a gene of interest is inserted into the viral genome under the control of a promoter that is active in the desired host cells. The host cells, in turn, express the VSV-G protein, another env protein suitable for vector pseudotyping, or the viral vector's native env protein, under the control of a promoter the activity of which is dependent on an activity of a product encoded by the gene of interest, so that a viral vector with a mutation leading to increased activity of the gene of interest will be packaged with higher efficiency than a vector with baseline or a loss-of-function mutation.

[0282] In some embodiments, mammalian host cells are subjected to infection by a continuously evolving population of viral vectors, for example, VSV vectors comprising a gene of interest and lacking the VSV-G encoding gene, wherein the host cells comprise a gene encoding the VSV-G protein under the control of a conditional promoter. Such retrovirus-bases system could be a two-vector system (the viral vector and an expression construct comprising a gene encoding the envelope protein), or, alternatively, a helper virus can be employed, for example, a VSV helper virus. A helper virus typically comprises a truncated viral genome deficient of structural elements required to package the genome into viral particles, but including viral genes encoding proteins required for viral genome processing in the host cell, and for the generation of viral particles. In such embodiments, the viral vector-based system could be a three-vector system (the viral vector, the expression construct comprising the envelope protein driven by a conditional promoter, and the helper virus comprising viral functions required for viral genome propagation but not the envelope protein). In some embodiments, expression of the five genes of the VSV genome from a helper virus or expression construct in the host cells, allows for production of infectious viral particles carrying a gene of interest, indicating that unbalanced gene expression permits viral replication at a reduced rate, suggesting that reduced expression of VSV-G would indeed serve as a limiting step in efficient viral production.

[0283] One advantage of using a helper virus is that the viral vector can be deficient in genes encoding proteins or other functions provided by the helper virus, and can, accordingly, carry a longer gene of interest. In some embodiments, the helper virus does not express an envelope protein, because expression of a viral envelope protein is known to reduce the infectability of host cells by some viral vectors via receptor interference. Viral vectors, for example retroviral vectors, suitable for continuous evolution processes, their respective envelope proteins, and helper viruses for such vectors, are well known to those of skill in the art. For an overview of some exemplary viral genomes, helper viruses, host cells, and envelope proteins suitable for continuous evolution procedures as described herein, see Coffin et al., Retroviruses, CSHL Press 1997, ISBNO-87969-571-4, incorporated herein in its entirety.

[0284] In some embodiments, the incubating of the host cells is for a time sufficient for at least 10, at least 20, at least 30, at least 40, at least 50, at least 100, at least 200, at least 300, at least 400, at least, 500, at least 600, at least 700, at least 800, at least 900, at least 1000, at least 1250, at least 1500, at least 1750, at least 2000, at least 2500, at least 3000, at least 4000, at least 5000, at least 7500, at least 10000, or more consecutive viral life cycles. In certain embodiments, the viral vector is an M13 phage, and the length of a single viral life cycle is about 10-20 minutes.

[0285] In some embodiments, a viral vector/host cell combination is chosen in which the life cycle of the viral vector is significantly shorter than the average time between cell divisions of the host cell. Average cell division times and viral vector life cycle times are well known in the art for many cell types and vectors, allowing those of skill in the art to ascertain such host cell/vector combinations. In certain embodiments, host cells are being removed from the population of host cells contacted with the viral vector at a rate that results in the average time of a host cell remaining in the host cell population before being removed to be shorter than the average time between cell divisions of the host cells, but to be longer than the average life cycle of the viral vector employed. The result of this is that the host cells, on average, do not have sufficient time to proliferate during their time in the host cell population while the viral vectors do have sufficient time to infect a host cell, replicate in the host cell, and generate new viral particles during the time a host cell remains in the cell population. This assures that the only replicating nucleic acid in the host cell population is the viral vector, and that the host cell genome, the accessory plasmid, or any other nucleic acid constructs cannot acquire mutations allowing for escape from the selective pressure imposed.

[0286] For example, in some embodiments, the average time a host cell remains in the host cell population is about 10, about 11, about 12, about 13, about 14, about 15, about 16, about 17, about 18, about 19, about 20, about 21, about 22, about 23, about 24, about 25, about 30, about 35, about 40, about 45, about 50, about 55, about 60, about 70, about 80, about 90, about 100, about 120, about 150, or about 180 minutes.

[0287] In some embodiments, the average time a host cell remains in the host cell population depends on how fast the host cells divide and how long infection (or conjugation) requires. In general, the flow rate should be faster than the average time required for cell division, but slow enough to allow viral (or conjugative) propagation. The former will vary, for example, with the media type, and can be delayed by adding cell division inhibitor antibiotics (FtsZ inhibitors in E. coli, etc.). Since the limiting step in continuous evolution is production of the protein required for gene transfer from cell to cell, the flow rate at which the vector washes out will depend on the current activity of the gene(s) of interest. In some embodiments, titratable production of the protein required for the generation of infectious particles, as described herein, can mitigate this problem. In some embodiments, an indicator of phage infection allows computer-controlled optimization of the flow rate for the current activity level in real-time.

[0288] In some embodiments, the fresh host cells comprise the accessory plasmid required for selection of viral vectors, for example, the accessory plasmid comprising the gene required for the generation of infectious phage particles that is lacking from the phages being evolved. In some embodiments, the host cells are generated by contacting an uninfected host cell with the relevant vectors, for example, the accessory plasmid and, optionally, a mutagenesis plasmid, and growing an amount of host cells sufficient for the replenishment of the host cell population in a continuous evolution experiment. Methods for the introduction of plasmids and other gene constructs into host cells are well known to those of skill in the art and the disclosure is not limited in this respect. For bacterial host cells, such methods include, but are not limited to, electroporation and heat-shock of competent cells.

[0289] In some embodiments, the accessory plasmid comprises a selection marker, for example, an antibiotic resistance marker, and the fresh host cells are grown in the presence of the respective antibiotic to ensure the presence of the plasmid in the host cells. Where multiple plasmids are present, different markers are typically used. Such selection markers and their use in cell culture are known to those of skill in the art, and the disclosure is not limited in this respect.

[0290] In some embodiments, the selection marker is a spectinomycin antibiotic resistance marker. Cells are transformed with a selection plasmid containing an inactivated spectinomycin resistance gene with a premature stop codon or a mutation at an active site (K205T or D182V) that each requires T:A to A:T editing to correct. Cells that fail to install the correct transversion mutation in the spectinomycin resistance gene will die, while cells that make the correction will survive. E. coli cells expressing an sgRNA targeting the K205T or D182V defect in the spectinomycin resistance gene and a nucleobase modification domain-dCas9 fusion protein were plated onto 2xYT agar with 256 μg/mL of spectinomycin. Surviving colonies (measured through CFUs) were sequenced to find consensus mutations in the fusion proteins expressed in the evolved survivors. A similar selection assay was used to evolve adenosine deaminase activity in DNA during adenine base editor development, as described in Gaudelli, N. M. et al., Programmable base editing of A•T to G•C in genomic DNA without DNA cleavage. Nature 551, 464-471 (2017), herein incorporated in its entirety by reference.

[0291] In some embodiments, the selection marker is a chloramphenicol antibiotic resistance marker. Cells are transformed with a selection plasmid containing an inactivated chloramphenicol resistance gene with a mutation at an active site (H193Q) that requires T:A to A:T editing to correct. Cells that fail to install the correct transversion mutation in the chloramphenicol resistance gene will die, while cells that make the correction will survive. E. coli cells expressing an sgRNA targeting the H193Q defect in the chloramphenicol resistance gene and a nucleobase modification domain-dCas9 fusion protein were plated onto 2xYT agar with 256 μg/mL of chloramphenicol. Surviving colonies (measured through CFUs) were sequenced to find consensus mutations in the fusion proteins expressed in the evolved survivors.

[0292] In other embodiments, the selection marker is a carbenicillin antibiotic resistance marker. Cells are transformed with a selection plasmid containing an inactivated carbenicillin resistance gene with a premature stop codon (Y95X) or a mutation at an active site (S233A or E166A) that each require T:A to A:T editing to correct (FIG. 2). Cells that fail to install the correct transversion mutation in the carbenicillin resistance gene will die, while cells that make the correction will survive. E. coli cells expressing an sgRNA targeting the defect in the carbenecillin resistance gene and a nucleobase modification domain-dCas9 fusion protein were plated onto 2xYT agar with 256 μg/mL of carbenicillin. Surviving colonies (measured through CFUs) were sequenced to find consensus mutations in the fusion proteins expressed in the evolved survivors.

[0293] In some embodiments, the host cell population in a continuous evolution experiment is replenished with fresh host cells growing in a parallel, continuous culture. In some embodiments, the cell density of the host cells in the host cell population contacted with the viral vector and the density of the fresh host cell population is substantially the same.

[0294] Typically, the cells being removed from the cell population contacted with the viral vector comprise cells that are infected with the viral vector and uninfected cells. In some embodiments, cells are being removed from the cell populations continuously, for example, by effecting a continuous outflow of the cells from the population. In other embodiments, cells are removed semi-continuously or intermittently from the population. In some embodiments, the replenishment of fresh cells will match the mode of removal of cells from the cell population, for example, if cells are continuously removed, fresh cells will be continuously introduced. However, in some embodiments, the modes of replenishment and removal may be mismatched, for example, a cell population may be continuously replenished with fresh cells, and cells may be removed semi-continuously or in batches.

[0295] In some embodiments, the rate of fresh host cell replenishment and/or the rate of host cell removal is adjusted based on quantifying the host cells in the cell population. For example, in some embodiments, the turbidity of culture media comprising the host cell population is monitored and, if the turbidity falls below a threshold level, the ratio of host cell inflow to host cell outflow is adjusted to effect an increase in the number of host cells in the population, as manifested by increased cell culture turbidity. In other embodiments, if the turbidity rises above a threshold level, the ratio of host cell inflow to host cell outflow is adjusted to effect a decrease in the number of host cells in the population, as manifested by decreased cell culture turbidity. Maintaining the density of host cells in the host cell population within a specific density range ensures that enough host cells are available as hosts for the evolving viral vector population, and avoids the depletion of nutrients at the cost of viral packaging and the accumulation of cell-originated toxins from overcrowding the culture.

[0296] In some embodiments, the cell density in the host cell population and/or the fresh host cell density in the inflow is about 102 cells/ml to about 1012 cells/ml. In some embodiments, the host cell density is about 102 cells/ml, about 103 cells/ml, about 104 cells/ml, about 105 cells/ml, about 5·105 cells/ml, about 106 cells/ml, about 5·106 cells/ml, about 107 cells/ml, about 5·107 cells/ml, about 108 cells/ml, about 5·108 cells/ml, about 109 cells/ml, about 5·109 cells/ml, about 1010 cells/ml, or about 5·1010 cells/ml. In some embodiments, the host cell density is more than about 1010 cells/ml.

[0297] In some embodiments, the host cell population is contacted with a mutagen. In some embodiments, the cell population contacted with the viral vector (e.g., the phage), is continuously exposed to the mutagen at a concentration that allows for an increased mutation rate of the gene of interest, but is not significantly toxic for the host cells during their exposure to the mutagen while in the host cell population. In other embodiments, the host cell population is contacted with the mutagen intermittently, creating phases of increased mutagenesis, and accordingly, of increased viral vector diversification. For example, in some embodiments, the host cells are exposed to a concentration of mutagen sufficient to generate an increased rate of mutagenesis in the gene of interest for about 10%, about 20%, about 50%, or about 75% of the time.

[0298] In some embodiments, the host cells comprise a mutagenesis expression construct, for example, in the case of bacterial host cells, a mutagenesis plasmid. In some embodiments, the mutagenesis plasmid comprises a gene expression cassette encoding a mutagenesis-promoting gene product, for example, a proofreading-impaired DNA polymerase. In other embodiments, the mutagenesis plasmid, including a gene involved in the SOS stress response, (e.g., UmuC, UmuD′, and/or RecA). In some embodiments, the mutagenesis-promoting gene is under the control of an inducible promoter. Suitable inducible promoters are well known to those of skill in the art and include, for example, arabinose-inducible promoters, tetracycline or doxycyclin-inducible promoters, and tamoxifen-inducible promoters. In some embodiments, the host cell population is contacted with an inducer of the inducible promoter in an amount sufficient to effect an increased rate of mutagenesis. For example, in some embodiments, a bacterial host cell population is provided in which the host cells comprise a mutagenesis plasmid in which a dnaQ926, UmuC, UmuD′, and RecA expression cassette is controlled by an arabinose-inducible promoter. In some such embodiments, the population of host cells is contacted with the inducer, for example, arabinose in an amount sufficient to induce an increased rate of mutation.

[0299] In some embodiments, diversifying the viral vector population is achieved by providing a flow of host cells that does not select for gain-of-function mutations in the gene of interest for replication, mutagenesis, and propagation of the population of viral vectors. In some embodiments, the host cells are host cells that express all genes required for the generation of infectious viral particles, for example, bacterial cells that express a complete helper phage, and, thus, do not impose selective pressure on the gene of interest. In other embodiments, the host cells comprise an accessory plasmid comprising a conditional promoter with a baseline activity sufficient to support viral vector propagation even in the absence of significant gain-of-function mutations of the gene of interest. This can be achieved by using a “leaky” conditional promoter, by using a high-copy number accessory plasmid, thus amplifying baseline leakiness, and/or by using a conditional promoter on which the initial version of the gene of interest effects a low level of activity while a desired gain-of-function mutation effects a significantly higher activity.

[0300] Detailed methods of procedures for directing continuous evolution of base editors in a population of host cells using phage particles are disclosed in International PCT Application, PCT/US2009/056194, filed Sep. 8, 2009, published as WO 2010/028347 on Mar. 11, 2010; International PCT Application, PCT/US2011/066747, filed Dec. 22, 2011, published as WO 2012/088381 on Jun. 28, 2012; U.S. Pat. No. 9,023,594, issued May 5, 2015; U.S. Pat. No. 9,771,574, issued Sep. 26, 2017; U.S. Pat. No. 9,394,537, issued Jul. 19, 2016; International PCT Application, PCT/US2015/012022, filed Jan. 20, 2015, published as WO 2015/134121 on Sep. 11, 2015; U.S. Pat. No. 10,179,911, issued Jan. 15, 2019; International Application No. PCT/US2019/37216, published as WO 2019/241649 on Dec. 19, 2019, International Patent Publication WO 2019/023680, published Jan. 31, 2019, International PCT Application, PCT/US2016/027795, filed Apr. 15, 2016, published as WO 2016/168631 on Oct. 20, 2016, and International Application No. PCT/US2019/47996, filed Aug. 23, 2019, each of which are incorporated herein by reference.

[0301] Methods and strategies to design conditional promoters suitable for carrying out the selection strategies described herein are well known to those of skill in the art. For an overview over exemplary suitable selection strategies and methods for designing conditional promoters driving the expression of a gene required for cell-cell gene transfer, e.g., gene III (gIII), see Vidal and Legrain, Yeast n-hybrid review, Nucleic Acid Res. 27, 919 (1999), incorporated herein in its entirety.

[0302] The disclosure provides vectors for the continuous evolution processes. In some embodiments, phage vectors for phage-assisted continuous evolution are provided. In some embodiments, a selection phage is provided that comprises a phage genome deficient in at least one gene required for the generation of infectious phage particles and a gene of interest to be evolved. Reference is made to International Patent Publication WO 2019/023680, published Jan. 31, 2019, herein incorporated by reference.

[0303] For example, in some embodiments, a population of host cells comprising a high-copy accessory plasmid with a gene required for the generation of infectious phage particles is contacted with a selection phage comprising a gene of interest, wherein the accessory plasmid comprises a conditional promoter driving expression of the gene required for the generation from a conditional promoter, the activity of which is dependent on the activity of a gene product encoded by the gene of interest. In some such embodiments, a low stringency selection phase can be achieved by designing the conditional promoter in a way that the initial gene of interest exhibits some activity on that promoter. For example, if a transcriptional activator, such as a T7RNAP or a transcription factor is to be evolved to recognize a non-native target DNA sequence (e.g., a T3RNAP promoter sequence, on which T7RNAP has no activity), a low-stringency accessory plasmid can be designed to comprise a conditional promoter in which the target sequence comprises a desired characteristic, but also retains a feature of the native recognition sequence that allows the transcriptional activator to recognize the target sequence, albeit with less efficiency than its native target sequence. Initial exposure to such a low-stringency accessory plasmid comprising a hybrid target sequence (e.g., a T7/T3 hybrid promoter, with some features of the ultimately desired target sequence and some of the native target sequence) allows the population of phage vectors to diversify by acquiring a plurality of mutations that are not immediately selected against based on the permissive character of the accessory plasmid. Such a diversified population of phage vectors can then be exposed to a stringent selection accessory plasmid, for example, a plasmid comprising in its conditional promoter the ultimately desired target sequence that does not retain a feature of the native target sequence, thus generating a strong negative selective pressure against phage vectors that have not acquired a mutation allowing for recognition of the desired target sequence.

[0304] In some embodiments, an initial host cell population contacted with a population of evolving viral vectors is replenished with fresh host cells that are different from the host cells in the initial population. For example, in some embodiments, the initial host cell population is made of host cells comprising a low-stringency accessory plasmid, or no such plasmid at all, or are permissible for viral infection and propagation. In some embodiments, after diversifying the population of viral vectors in the low-stringency or no-selection host cell population, fresh host cells are introduced into the host cell population that impose a more stringent selective pressure for the desired function of the gene of interest. For example, in some embodiments, the secondary fresh host cells are not permissible for viral replication and propagation anymore. In some embodiments, the stringently selective host cells comprise an accessory plasmid in which the conditional promoter exhibits none or only minimal baseline activity, and/or which is only present in low or very low copy numbers in the host cells.

[0305] Such methods involving host cells of varying selective stringency allow for harnessing the power of continuous evolution methods as provided herein for the evolution of functions that are completely absent in the initial version of the gene of interest, for example, for the evolution of a transcription factor recognizing a foreign target sequence that a native transcription factor, used as the initial gene of interest, does not recognize at all. Or, for another example, the recognition of a desired target sequence by a DNA-binding protein, a recombinase, a nuclease, a zinc-finger protein, or an RNA-polymerase, that does not bind to or does not exhibit any activity directed towards the desired target sequence.

[0306] In some embodiments, negative selection is applied during a continuous evolution method as described herein, by penalizing undesired activities. In some embodiments, this is achieved by causing the undesired activity to interfere with pIII production. For example, expression of an antisense RNA complementary to the gIII RBS and/or start codon is one way of applying negative selection, while expressing a protease (e.g., TEV) and engineering the protease recognition sites into pIII is another.

[0307] In some embodiments, negative selection is applied during a continuous evolution method as described herein, by penalizing the undesired activities of evolved products. This is useful, for example, if the desired evolved product is an enzyme with high specificity, for example, a transcription factor or protease with altered, but not broadened, specificity. In some embodiments, negative selection of an undesired activity is achieved by causing the undesired activity to interfere with pIII production, thus inhibiting the propagation of phage genomes encoding gene products with an undesired activity. In some embodiments, expression of a dominant-negative version of pIII or expression of an antisense RNA complementary to the gIII RBS and/or gIII start codon is linked to the presence of an undesired activity. In some embodiments, a nuclease or protease cleavage site, the recognition or cleavage of which is undesired, is inserted into a pIII transcript sequence or a pIII amino acid sequence, respectively. In some embodiments, a transcriptional or translational repressor is used that represses expression of a dominant negative variant of pIII and comprises a protease cleavage site the recognition or cleaveage of which is undesired.

[0308] In some embodiments, counter-selection against activity on non-target substrates is achieved by linking undesired evolved product activities to the inhibition of phage propagation. For example, in some embodiments, in which a transcription factor is evolved to recognize a specific target sequence, but not an undesired off-target sequence, a negative selection cassette is employed, comprising a nucleic acid sequence encoding a dominant-negative version of pIII (pIII-neg) under the control of a promoter comprising the off-target sequence. If an evolution product recognizes the off-target sequence, the resulting phage particles will incorporate pIII-neg, which results in an inhibition of phage infective potency and phage propagation, thus constituting a selective disadvantage for any phage genomes encoding an evolution product exhibiting the undesired, off-target activity, as compared to evolved products not exhibiting such an activity. In some embodiments, a dual selection strategy is applied during a continuous evolution experiment, in which both positive selection and negative selection constructs are present in the host cells. In some such embodiments, the positive and negative selection constructs are situated on the same plasmid, also referred to as a dual selection accessory plasmid.

[0309] For example, in some embodiments, a dual selection accessory plasmid is employed comprising a positive selection cassette, comprising a pIII-encoding sequence under the control of a promoter comprising a target nucleic acid sequence, and a negative selection cassette, comprising a pIII-neg encoding cassette under the control of a promoter comprising an off-target nucleic acid sequence. One advantage of using a simultaneous dual selection strategy is that the selection stringency can be fine-tuned based on the activity or expression level of the negative selection construct as compared to the positive selection construct. Another advantage of a dual selection strategy is the selection is not dependent on the presence or the absence of a desired or an undesired activity, but on the ratio of desired and undesired activities, and, thus, the resulting ratio of pIII and pIII-neg that is incorporated into the respective phage particle.

[0310] Some embodiments of this disclosure provide or utilize a dominant negative variant of pIII (pIII-neg). These embodiments are based on the discovery that a pIII variant that comprises the two N-terminal domains of pIII and a truncated, termination-incompetent C-terminal domain is not only inactive but is a dominant-negative variant of pIII. A pIII variant comprising the two N-terminal domains of pIII and a truncated, termination-incompetent C-terminal domain was described in Bennett, N. J.; Rakonjac, J., Unlocking of the filamentous bacteriophage virion during infection is mediated by the C domain of pIII. Journal of Molecular Biology 2006, 356 (2), 266-73; the entire contents of which are incorporated herein by reference.

[0311] Positive and negative selection strategies can further be designed to link non-DNA directed activities to phage propagation efficiency. For example, protease activity towards a desired target protease cleavage site can be linked to pIII expression by devising a repressor of gene expression that can be inactivated by a protease recognizing the target site. In some embodiments, pIII expression is driven by a promoter comprising a binding site for such a repressor. Suitable transcriptional repressors are known to those in the art, and one exemplary repressor is the lambda repressor protein, that efficiently represses the lambda promoter pR and can be modified to include a desired protease cleavage site (see, e.g., Sices, H. J.; Kristie, T. M., A genetic screen for the isolation and characterization of site-specific proteases. Proc. Natl. Acad. Sci. USA 1998, 95 (6), 2828-33; and Sices, H. J. et al., Rapid genetic selection of inhibitor-resistant protease mutants: clinically relevant and novel mutants of the HIV protease. AIDS Res Hum Retroviruses 2001, 17 (13), 1249-55, the entire contents of each of which are incorporated herein by reference). The lambda repressor (cI) contains an N-terminal DNA binding domain and a C-terminal dimerization domain. These two domains are connected by a flexible linker. Efficient transcriptional repression requires the dimerization of cI, and, thus, cleavage of the linker connecting dimerization and binding domains results in abolishing the repressor activity of cI.

[0312] Some embodiments provide a pIII expression construct that comprises a pR promoter (containing cI binding sites) driving expression of pIII. When expressed together with a modified cI comprising a desired protease cleavage site in the linker sequence connecting dimerization and binding domains, the cI molecules will repress pIII transcription in the absence of the desired protease activity, and this repression will be abolished in the presence of such activity, thus providing a linkage between protease cleavage activity and an increase in pIII expression that is useful for positive PACE protease selection. Some embodiments provide a negative selection strategy against undesired protease activity in PACE evolution products. In some embodiments, the negative selection is conferred by an expression cassette comprising a pIII-neg encoding nucleic acid under the control of a cI-repressed promoter. When co-expressed with a cI repressor protein comprising an undesired protease cleavage site, expression of pIII-neg will occur in cell harboring phage expressing a protease exhibiting protease activity towards the undesired target site, thus negatively selecting against phage encoding such undesired evolved products. A dual selection for protease target specificity can be achieved by co-expressing cI-repressible pIII and pIII-neg encoding expression constructs with orthogonal cI variants recognizing different nucleic acid target sequences, and thus allowing for simultaneous expression without interfering with each other. Orthogonal cI variants in both dimerization specificity and DNA-binding specificity are known to those of skill in the art (see, e.g., Wharton, R. P.; Ptashne, M., Changing the binding specificity of a repressor by redesigning an alphahelix. Nature 1985, 316 (6029), 601-5; and Wharton, R. P.; Ptashne, M., A new-specificity mutant of 434 repressor that defines an amino acid-base pair contact. Nature 1987, 326 (6116), 888-91, the entire contents of each of which are incorporated herein by reference).

[0313] Other selection schemes for gene products having a desired activity are well known to those of skill in the art or will be apparent from the instant disclosure. Selection strategies that can be used in continuous evolution processes and methods as provided herein include, but are not limited to, selection strategies useful in two-hybrid screens. For example, in the T7 RNAP selection strategy, successful base editing leads to a translation of T7 RNAP without a C-terminal proteolytic degaradation tag, which enables transcripton of geneIII (or a luciferase reporter) from a T7 promoter.

[0314] Two-hybrid accessory plasmid setups further permit the evolution of protein-protein interactions, and accessory plasmids requiring site-specific recombinase activity for production of the protein required for the generation of infectious viral particles, for example, pIII, allow recombinases to be evolved to recognize any desired target site. A two-hybrid setup or a related one-hybrid setup can further be used to evolve DNA-binding proteins, while a three-hybrid setup can evolve RNA-protein interactions.

[0315] Biosynthetic pathways producing small molecules can also be evolved with a promoter or riboswitch (e.g., controlling gene III expression/translation) that is responsive to the presence of the desired small molecule. For example, a promoter that is transcribed only in the presence of butanol could be placed on the accessory plasmid upstream of gene III to optimize a biosynthetic pathway encoding the enzymes for butanol synthesis. A phage vector carrying a gene of interest that has acquired an activity boosting butanol synthesis would have a selective advantage over other phages in an evolving phage population that have not acquired such a gain-of-function. Alternatively, a chemical complementation system, for example, as described in Baker and Cornish, PNAS (2002), incorporated herein by reference, can be used to evolve individual proteins or enzymes capable of bond formation reactions. In other embodiments, a trans-splicing intron designed to splice itself into a particular target sequence can be evolved by expressing only the latter half of gene III from the accessory plasmid, preceded by the target sequence, and placing the other half (fused to the trans-splicing intron) on the selection phage. Successful splicing would reconstitute full-length pIII-encoding mRNA. Protease specificity and activity can be evolved by expressing pIII fused to a large protein from the accessory plasmid, separated by a linker containing the desired protease recognition site. Cleavage of the linker by active protease encoded by the selection phage would result in infectious pIII, while uncleaved pIII would be unable to bind due to the blocking protein. Further, As described, for example, by Malmborg and Borrebaeck 1997, a target antigen can be fused to the F pilus of a bacteria, blocking wild-type pIII from binding. Phage displaying antibodies specific to the antigen could bind and infect, yielding enrichments of >1000-fold in phage display. In some embodiments, this system can be adapted for continuous evolution, in that the accessory plasmid is designed to produce wild-type pIII to contact the tolA receptor and perform the actual infection (as the antibody-pIII fusion binds well but infects with low efficiency), while the selection phage encodes the pIII-antibody fusion protein. Progeny phage containing both types of pIII tightly adsorb to the F pilus through the antibody-antigen interaction, with the wild-type pIII contacting tolA and mediating high-efficiency infection. To allow propagation when the initial antibody-antigen interaction is weak, a mixture of host cells could flow into the lagoon: a small fraction expressing wild-type pili and serving as a reservoir of infected cells capable of propagating any selection phage regardless of activity, while the majority of cells requires a successful interaction, serving as the “reward” for any mutants that improve their binding affinity. This last system, in some embodiments, can evolve new antibodies that are effective against a target pathogen faster than the pathogen itself can evolve, since the evolution rates of PACE and other systems described herein are higher than those of human-specific pathogens, for example, those of human viruses.

[0316] Methods and strategies to design conditional promoters suitable for carrying out the selections strategies described herein are well known to those of skill in the art. For an overview over exemplary suitable selection strategies and methods for designing conditional promoters driving the expression of a gene required for cell-cell gene transfer, e.g. gIII, see Vidal and Legrain, Yeast n-hybrid review, Nucleic Acid Res. 27, 919 (1999), incorporated herein in its entirety.

[0317] By contrast, the PANCE method begins by first growing the host strain containing a mutagenesis plasmid of E. coli until optical density reaches A₆₀₀=0.3−0.5 in a large volume. The cells are re-transformed with the mutagenesis plasmid regularly to ensure the plasmid has not been inactivated. An aliquot of a desired concentration, often 2 mL, is then transferred to a smaller flask, supplemented with inducing agent arabinose (Ara) for the mutagenesis plasmid, and infected with the selection phage (SP). To increase the titer level, a drift plasmid can also be provided that enables phage to propagate without passing the selection. Expression is under the control of an inducible promoter and can be turned on with 50 ng/mL of anhydrotetracycline. This culture is incubated at 37° C. for 8-12 h to facilitate phage growth, which is confirmed by determination of the phage titer. Following phage growth, an aliquot of infected cells is used to transfect a subsequent flask containing host E. coli. This process is continued until the desired phenotype is evolved for as many transfers as required, while increasing the stringency in stepwise fashion by decreasing the incubation time or titer of phage with which the bacteria is infected. Reference is made to Suzuki T. et al., Crystal structures reveal an elusive functional domain of pyrrolysyl-tRNA synthetase, Nat Chem Biol. 13(12): 1261-1266 (2017), incorporated herein in its entirety.

[0318] Other non-continuous selection schemes for gene products having a desired activity are well known to those of skill in the art or will be apparent from the instant disclosure. In certain embodiments, following the successful directed evolution of one or more components of the transversion base editor (e.g., a Cas9 domain or an adenosine methyltransferase domain), methods of making the base editors comprise recombinant protein expression methodologies known to one of ordinary skill in the art.

### Vectors

[0319] Several embodiments of making and using the fusion proteins of the disclosure relate to vector systems comprising one or more vectors, or vectors encoding the disclosed ATBEs. Vectors can be designed to clone and/or express the fusion proteins of the disclosure. Vectors may also be designed to transfect the fusion proteins of the disclosure into one or more cells, e.g., a target diseased eukaryotic cell for treatment with the ATBE systems and methods disclosed herein.

[0320] Vectors may be designed for expression of base editor transcripts (e.g. nucleic acid transcripts, proteins, or enzymes) in prokaryotic or eukaryotic cells. For example, base editor transcripts may be expressed in bacterial cells such as Escherichia coli, insect cells (using baculovirus expression vectors), yeast cells, or mammalian cells. Suitable host cells are discussed further in Goeddel, Gene Expression Technology: Methods In Enzymology 185, Academic Press. San Diego, Calif. (1990). Alternatively, expression vectors encoding one or more base editors described herein may be transcribed and translated in vitro, for example using T7 promoter regulatory sequences and T7 polymerase.

[0321] Vectors relating to the rational mutagenesis approaches disclosed herein, such as PACE, may be introduced and propagated in a prokaryotic cells. In some embodiments, a prokaryote is used to amplify copies of a vector to be introduced into a eukaryotic cell or as an intermediate vector in the production of a vector to be introduced into a eukaryotic cell (e.g. amplifying a plasmid as part of a viral vector packaging system). In some embodiments, a prokaryote is used to amplify copies of a vector and express one or more nucleic acids, such as to provide a source of one or more proteins for delivery to a host cell or host organism. Expression of proteins in prokaryotes is most often carried out in Escherichia coli with vectors containing constitutive or inducible promoters directing the expression of either fusion or non-fusion proteins.

[0322] Fusion expression vectors also may be used to express the base editors of the disclosure. Such vectors generally add a number of amino acids to a protein encoded therein, such as to the amino terminus of the recombinant protein. Such fusion vectors may serve one or more purposes, such as: (i) to increase expression of a recombinant protein; (ii) to increase the solubility of a recombinant protein; and (iii) to aid in the purification of a recombinant protein by acting as a ligand in affinity purification. Often, in fusion expression vectors, a proteolytic cleavage site is introduced at the junction of the fusion domain and the recombinant protein to enable separation of the recombinant protein from the fusion domain subsequent to purification of the fusion protein. Such enzymes, and their cognate recognition sequences, include Factor Xa, thrombin and enterokinase. Example fusion expression vectors include pGEX (Pharmacia Biotech Inc; Smith and Johnson, 1988. Gene 67: 31-40), pMAL (New England Biolabs, Beverly, Mass.) and pRIT5 (Pharmacia, Piscataway, N.J.) that fuse glutathione S-transferase (GST), maltose E binding protein, or protein A, respectively, to the target recombinant protein.

[0323] Examples of suitable inducible non-fusion E. coli expression vectors include pTrc (Amrann et al., (1988) Gene 69:301-315) and pET 11d (Studier et al., Gene Expression Technology: Methods In Enzymology 185, Academic Press, San Diego, Calif. (1990) 60-89).

[0324] In some embodiments, a vector is a yeast expression vector for expressing the base editors described herein. Examples of vectors for expression in yeast Saccharomyces cerivisae include pYepSec1 (Baldari, et al., 1987. EMBO J. 6: 229-234), pMFa (Kuijan and Herskowitz, 1982. Cell 30: 933-943), pJRY88 (Schultz et al., 1987. Gene 54: 113-123), pYES2 (Invitrogen Corporation, San Diego, Calif.), and picZ (InVitrogen Corp, San Diego, Calif.).

[0325] In some embodiments, a vector drives protein expression in insect cells using baculovirus expression vectors. Baculovirus vectors available for expression of proteins in cultured insect cells (e.g., SF9 cells) include the pAc series (Smith, et al., 1983. Mol. Cell. Biol. 3: 2156-2165) and the pVL series (Lucklow and Summers, 1989. Virology 170: 31-39).

[0326] In some embodiments, a vector is capable of driving expression of one or more sequences in mammalian cells using a mammalian expression vector. Examples of mammalian expression vectors include pCDM8 (Seed, 1987. Nature 329: 840) and pMT2PC (Kaufman, et al., 1987. EMBO J. 6: 187-195). When used in mammalian cells, the expression vector's control functions are typically provided by one or more regulatory elements. For example, commonly used promoters are derived from polyoma, adenovirus 2, cytomegalovirus, simian virus 40, and others disclosed herein and known in the art. For other suitable expression systems for both prokaryotic and eukaryotic cells see, e.g., Chapters 16 and 17 of Sambrook, et al., Molecular Cloning: A Laboratory Manual. 2nd ed., Cold Spring Harbor Laboratory, Cold Spring Harbor Laboratory Press, Cold Spring Harbor, N.Y., 1989.

[0327] In some embodiments, the recombinant mammalian expression vector is capable of directing expression of the nucleic acid preferentially in a particular cell type (e.g., tissue-specific regulatory elements are used to express the nucleic acid). Tissue-specific regulatory elements are known in the art. Non-limiting examples of suitable tissue-specific promoters include the albumin promoter (liver-specific; Pinkert, et al., 1987. Genes Dev. 1: 268-277), lymphoid-specific promoters (Calame and Eaton, 1988. Adv. Immunol. 43: 235-275), in particular promoters of T cell receptors (Winoto and Baltimore, 1989. EMBO J. 8: 729-733) and immunoglobulins (Baneiji, et al., 1983. Cell 33: 729-740; Queen and Baltimore, 1983. Cell 33: 741-748), neuron-specific promoters (e.g., the neurofilament promoter; Byrne and Ruddle, 1989. Proc. Natl. Acad. Sci. USA 86: 5473-5477), pancreas-specific promoters (Edlund, et al., 1985. Science 230: 912-916), and mammary gland-specific promoters (e.g., milk whey promoter, U.S. Pat. No. 4,873,316 and European Application Publication No. 264,166). Developmentally-regulated promoters are also encompassed, e.g., the murine hox promoters (Kessel and Gruss, 1990. Science 249: 374-379) and the α-fetoprotein promoter (Campes and Tilghman, 1989. Genes Dev. 3: 537-546).

[0328] The disclosure provides viral vectors for the continuous and non-continuous evolution processes disclosed herein, e.g. PACE. In some embodiments, phage vectors for phage-assisted continuous evolution are provided. In some embodiments, a selection phage is provided that comprises a phage genome deficient in at least one gene required for the generation of infectious phage particles and a gene of interest to be evolved.

[0329] For example, in some embodiments, the selection phage comprises an M13 phage genome deficient in a gene required for the generation of infectious M13 phage particles, for example, a full-length gIII. In some embodiments, the selection phage comprises a phage genome providing all other phage functions required for the phage life cycle except the gene required for generation of infectious phage particles. In some such embodiments, an M13 selection phage is provided that comprises a gI, gII, gIV, gV, gVI, gVII, gVIII, gIX, and a gX gene, but not a full-length gIII. In some embodiments, the selection phage comprises a 3′-fragment of gIII, but no full-length gIII. The 3′-end of gIII comprises a promoter (see FIG. 16) and retaining this promoter activity is beneficial, in some embodiments, for an increased expression of gVI, which is immediately downstream of the gIII 3′-promoter, or a more balanced (wild-type phage-like) ratio of expression levels of the phage genes in the host cell, which, in turn, can lead to more efficient phage production. In some embodiments, the 3′-fragment of gIII gene comprises the 3′-gIII promoter sequence. In some embodiments, the 3′-fragment of gIII comprises the last 180 bp, the last 150 bp, the last 125 bp, the last 100 bp, the last 50 bp, or the last 25 bp of gIII. In some embodiments, the 3′-fragment of gIII comprises the last 180 bp of gIII.

[0330] M13 selection phage is provided that comprises a gene of interest in the phage genome, for example, inserted downstream of the gVIII 3′-terminator and upstream of the gIII-3′-promoter. In some embodiments, an M13 selection phage is provided that comprises a multiple cloning site for cloning a gene of interest into the phage genome, for example, a multiple cloning site (MCS) inserted downstream of the gVIII 3′-terminator and upstream of the gIII-3′-promoter.

[0331] Some embodiments of this disclosure provide a vector system for continuous evolution procedures, comprising of a viral vector, for example, a selection phage, and a matching accessory plasmid. In some embodiments, a vector system for phage-based continuous directed evolution is provided that comprises (a) a selection phage comprising a gene of interest to be evolved, wherein the phage genome is deficient in a gene required to generate infectious phage; and (b) an accessory plasmid comprising the gene required to generate infectious phage particle under the control of a conditional promoter, wherein the conditional promoter is activated by a function of a gene product encoded by the gene of interest.

[0332] In some embodiments, the selection phage is an M13 phage as described herein. For example, in some embodiments, the selection phage comprises an M13 genome including all genes required for the generation of phage particles, for example, gI, gII, gIV, gV, gVI, gVII, gVIII, gIX, and gX gene, but not a full-length gIII gene. In some embodiments, the selection phage genome comprises an F1 or an M13 origin of replication. In some embodiments, the selection phage genome comprises a 3′-fragment of gIII gene. In some embodiments, the selection phage comprises a multiple cloning site upstream of the gIII 3′-promoter and downstream of the gVIII 3′-terminator.

[0333] In some embodiments, the selection phage does not comprise a full length gVI. GVI is similarly required for infection as gIII and, thus, can be used in a similar fashion for selection as described for gIII herein. However, it was found that continuous expression of pIII renders some host cells resistant to infection by M13. Accordingly, it is desirable that pIII is produced only after infection. This can be achieved by providing a gene encoding pIII under the control of an inducible promoter, for example, an arabinose-inducible promoter as described herein, and providing the inducer in the lagoon, where infection takes place, but not in the turbidostat, or otherwise before infection takes place. In some embodiments, multiple genes required for the generation of infectious phage are removed from the selection phage genome, for example, gIII and gVI, and provided by the host cell, for example, in an accessory plasmid as described herein.

[0334] The vector system may further comprise a helper phage, wherein the selection phage does not comprise all genes required for the generation of phage particles, and wherein the helper phage complements the genome of the selection phage, so that the helper phage genome and the selection phage genome together comprise at least one functional copy of all genes required for the generation of phage particles, but are deficient in at least one gene required for the generation of infectious phage particles.

[0335] In some embodiments, the accessory plasmid of the vector system comprises an expression cassette comprising the gene required for the generation of infectious phage under the control of a conditional promoter. In some embodiments, the accessory plasmid of the vector system comprises a gene encoding pIII under the control of a conditional promoter the activity of which is dependent on a function of a product of the gene of interest.

[0336] In some embodiments, the vector system further comprises a mutagenesis plasmid, for example, an arabinose-inducible mutagenesis plasmid as described herein.

[0337] In some embodiments, the vector system further comprises a helper plasmid providing expression constructs of any phage gene not comprised in the phage genome of the selection phage or in the accessory plasmid.

[0338] In various embodiments of the vectors used herein in the continuous evolution processes may include the following component:

T7 RNA Polymerase
(SEQ ID NO: 56)
MNTINIAKNDFSDIELAAIPFNTLADHYGERLAREQLALEHESYEMGEAR
FRKMFERQLKAGEVADNAAAKPLITTLLPKMIARINDWFEEVKAKRGKRP
TAFQFLQEIKPEAVAYITIKTTLACLTSADNTTVQAVASAIGRAIEDEAR
FGRIRDLKAKHFKKNVEEQLNKRVGHVYKKAFMQVVEADMLSKGLLGGEA
WSSWHKEDSIHVGVRCIEMLIESTGMVSLHRQNAGVVGQDSETIELAPEY
AEAIATRAGALAGISPMFQPCVVPPKPWTGITGGGYWANGRRPLALVRTH
SKKALMRYEDVYMPEVYKAINIAQNTAWKINKKVLAVANVITKWKHCPVE
DIPAIEREELPMKPEDIDMNPEALTAWKRAAAAVYRKDKARKSRRISLEF
MLEQANKFANHKAIWFPYNMDWRGRVYAVSMFNPQGNDMTKGLLTLAKGK
PIGKEGYYWLKIHGANCAGVDKVPFPERIKFIEENHENIMACAKSPLENT
WWAEQDSPFCFLAFCFEYAGVQHHGLSYNCSLPLAFDGSCSGIQHFSAML
RDEVGGRAVNLLPSETVQDIYGIVAKKVNEILQADAINGTDNEVVTVTDE
NTGEISEKVKLGTKALAGQWLAYGVTRSVTKRSVMTLAYGSKEFGFRQQV
LEDTIQPAIDSGKGLMFTQPNQAAGYMAKLIWESVSVTVVAAVEAMNWLK
SAAKLLAAEVKDKKTGEILRKRCAVHWVTPDGFPVWQEYKKPIQTRLNLM
FLGQFRLQPTINTNKDSEIDAHKQESGIAPNFVHSQDGSHLRKTVVWAHE
KYGIESFALIHDSFGTIPADAANLFKAVRETMVDTYESCDVLADFYDQFA
DQLHESQLDKMPALPAKGNLNLRDILESDFAFA*

### Methods of Editing A Target Nucleobase Pair, Methods of Treatment, and Uses for the ATBEs

[0339] Some embodiments of the disclosure provide methods for editing a nucleic acid using the base editors described herein to effectuate substitution of an A:T base pair to a T:A base pair. In some embodiments, the method is a method for editing a nucleobase of a nucleic acid (e.g., a base pair of a double-stranded DNA sequence). In some embodiments, the method comprises the steps of: a) contacting a target region of a nucleic acid (e.g., a double-stranded DNA sequence) with a complex comprising a fusion protein (e.g., a Cas9 domain fused to an adenosine methyltransferase domain) and a guide nucleic acid (e.g., gRNA), wherein the target region comprises a targeted nucleobase pair. As a result of embodiments of these methods, strand separation of said target region is induced, a first nucleobase of said target nucleobase pair in a single strand of the target region is converted to a second nucleobase, and no more than one strand of said target region is cut (or nicked), wherein a third nucleobase complementary to the first nucleobase base is replaced by a fourth nucleobase complementary to the second nucleobase.

[0340] In some embodiments, the first nucleobase is an adenine (of the target A:T nucleobase pair). In some embodiments, the second nucleobase is the intermediate N1-methyladenosine. In some embodiments, the third nucleobase is also a thymine (of the target A:T base pair). In some embodiments, the fourth nucleobase is an adenine (of the T:A pair).

[0341] In some embodiments, the method results in less than 19%, 18%, 16%, 14%, 12%, 10%, 8%, 6%, 4%, 2%, 1%, 0.5%, 0.2%, or less than 0.1% indel formation. In some embodiments, the method further comprises replacing the second nucleobase with a fifth nucleobase that is complementary to the fourth nucleobase, thereby generating an intended edited base pair (e.g., A:T pair to an T:A pair). In some embodiments, at least 5% of the intended base pairs are edited. In some embodiments, at least 10%, 15%, 20%, 25%, 30%, 35%, 40%, 45%, or 50% of the intended base pairs are edited. In some embodiments, the method results in less than 20% indel formation in the nucleic acid. In other embodiments, the method results in less than 35% indel formation in the nucleic acid.

[0342] In some embodiments, the ratio of intended products to unintended products in the target nucleotide is at least 2:1, 5:1, 10:1, 20:1, 30:1, 40:1, 50:1, 60:1, 70:1, 80:1, 90:1, 100:1, or 200:1, or more. In some embodiments, the ratio of intended point mutation to indel formation is greater than 1:1, 10:1, 50:1, 100:1, 500:1, or 1000:1, or more. In some embodiments, the cut single strand (nicked strand) is hybridized to the guide nucleic acid. In some embodiments, the cut single strand is opposite to the strand comprising the first nucleobase. In some embodiments, the base editor comprises nickase activity. In some embodiments, the intended edited base pair is upstream of a PAM site. In some embodiments, the intended edited base pair is 1, 2, 3, 4, 5, 6, 7, 8, 9, 10, 11, 12, 13, 14, 15, 16, 17, 18, 19, or 20 nucleotides upstream of the PAM site. In some embodiments, the intended edited basepair is downstream of a PAM site. In some embodiments, the intended edited base pair is 1, 2, 3, 4, 5, 6, 7, 8, 9, 10, 11, 12, 13, 14, 15, 16, 17, 18, 19, or 20 nucleotides downstream stream of the PAM site. In some embodiments, the method does not require a canonical (e.g., NGG) PAM site. In some embodiments, the nucleobase editor comprises a linker. In some embodiments, the linker is 1-25 amino acids in length. In some embodiments, the linker is 5-20 amino acids in length. In some embodiments, linker is 10, 11, 12, 13, 14, 15, 16, 17, 18, 19, or 20 amino acids in length. In some embodiments, the target region comprises a target window, wherein the target window comprises the target nucleobase pair. In some embodiments, the target window comprises 1-10 nucleotides. In some embodiments, the target window is 1-9, 1-8, 1-7, 1-6, 1-5, 1-4, 1-3, 1-2, or 1 nucleotides in length. In some embodiments, the target window is 1, 2, 3, 4, 5, 6, 7, 8, 9, 10, 11, 12, 13, 14, 15, 16, 17, 18, 19, or 20 nucleotides in length. In some embodiments, the intended edited base pair is within the target window. In some embodiments, the target window comprises the intended edited base pair. In some embodiments, the method is performed using any of the base editors provided herein. In some embodiments, a target window is a editing window.

[0343] In some embodiments, the disclosure provides a method for editing a nucleobase pair of a double-stranded DNA sequence. In some embodiments, the method comprises a) contacting a target region of the double-stranded DNA sequence with a complex comprising a base editor and a guide nucleic acid (e.g., gRNA), where the target region comprises a target nucleobase pair (e.g., A:T target base pair), b) converting a first nucleobase (e.g., the A base) of said target nucleobase pair in a single strand of the target region to a second nucleobase (e.g., converted to an intermediate, such as, N1-methyladenosine, which is then replaced with a T through DNA replication/repair processes), c) cutting (or nicking) no more than one strand of said target region, wherein a third nucleobase complementary to the first nucleobase base is replaced by a fourth nucleobase complementary to the second nucleobase, and the second nucleobase is replaced with a fifth nucleobase that is complementary to the fourth nucleobase, thereby generating an intended edited base pair, wherein the efficiency of generating the intended edited base pair is at least 5%.

[0344] In some embodiments, at least 5% of the intended base pairs are edited. In some embodiments, at least 10%, 15%, 20%, 25%, 30%, 35%, 40%, 45%, or 50% of the intended base pairs are edited. In some embodiments, the method causes less than 19%, 18%, 16%, 14%, 12%, 10%, 8%, 6%, 4%, 2%, 1%, 0.5%, 0.2%, or less than 0.1% indel formation. In some embodiments, the ratio of intended product to unintended products at the target nucleotide is at least 2:1, 5:1, 10:1, 20:1, 30:1, 40:1, 50:1, 60:1, 70:1, 80:1, 90:1, 100:1, or 200:1, or more. In some embodiments, the ratio of intended point mutation to indel formation is greater than 1:1, 10:1, 50:1, 100:1, 500:1, or 1000:1, or more. In some embodiments, the cut single strand is hybridized to the guide nucleic acid. In some embodiments, the cut single strand is opposite to the strand comprising the first nucleobase. In some embodiments, the nucleobase editor comprises adenosine methylation and/or DNA alkylation repair inhibition activity. In some embodiments, the nucleobase editor comprises nickase activity. In some embodiments, the intended edited base pair is upstream of a PAM site. In some embodiments, the intended edited base pair is 1, 2, 3, 4, 5, 6, 7, 8, 9, 10, 11, 12, 13, 14, 15, 16, 17, 18, 19, or 20 nucleotides upstream of the PAM site. In some embodiments, the intended edited basepair is downstream of a PAM site. In some embodiments, the intended edited base pair is 1, 2, 3, 4, 5, 6, 7, 8, 9, 10, 11, 12, 13, 14, 15, 16, 17, 18, 19, or 20 nucleotides downstream stream of the PAM site. In some embodiments, the method does not require a canonical (e.g., NGG) PAM site. In some embodiments, the nucleobase editor comprises a linker. In some embodiments, the linker is 1-25 amino acids in length. In some embodiments, the linker is 5-20 amino acids in length. In some embodiments, the linker is 10, 11, 12, 13, 14, 15, 16, 17, 18, 19, or 20 amino acids in length. In some embodiments, the target region comprises a target window, wherein the target window comprises the target nucleobase pair. In some embodiments, the target window comprises 1-10 nucleotides. In some embodiments, the target window is 1-9, 1-8, 1-7, 1-6, 1-5, 1-4, 1-3, 1-2, or 1 nucleotides in length. In some embodiments, the target window is 1, 2, 3, 4, 5, 6, 7, 8, 9, 10, 11, 12, 13, 14, 15, 16, 17, 18, 19, or 20 nucleotides in length. In some embodiments, the intended edited base pair occurs within the target window. In some embodiments, the target window comprises the intended edited base pair. In some embodiments, the nucleobase editor is any one of the base editors provided herein.

[0345] In another embodiment, the disclosure provides editing methods comprising contacting a DNA, or RNA molecule with any of the base editors provided herein, and with at least one guide nucleic acid (e.g., guide RNA), wherein the guide nucleic acid, (e.g., guide RNA) is about 15-100 nucleotides long and comprises a sequence of at least 10 contiguous nucleotides that is complementary to a target sequence. In some embodiments, the 3′ end of the target sequence is immediately adjacent to a canonical PAM sequence (NGG). In some embodiments, the 3′ end of the target sequence is not immediately adjacent to a canonical PAM sequence (NGG). In some embodiments, the 3′ end of the target sequence is immediately adjacent to an AGC, GAG, TTT, GTG, or CAA sequence.

[0346] In some embodiments, the target nucleic acid sequence comprises a sequence associated with a disease, disorder, or condition. In some embodiments, the target nucleic acid sequence comprises a point mutation associated with a disease, disorder, or condition. In some embodiments, the activity of the fusion protein (e.g., comprising an adenosine methyltransferase and a Cas9 domain), or the complex, results in a correction of the point mutation. In some embodiments, the target nucleic acid sequence comprises an A→T point mutation associated with a disease, disorder, or condition, and wherein the conversion of the A opposite the mutant T to a T results in a sequence that is not associated with a disease, disorder, or condition. The target sequence may comprise a T→A point mutation associated with a disease, disorder, or condition, and wherein the conversion of the mutant A to a T results in a sequence that is not associated with a disease, disorder, or condition. In some embodiments, the target nucleic acid sequence encodes a protein, and the point mutation is in a codon and results in a change in the amino acid encoded by the mutant codon as compared to the wild-type codon. In some embodiments, the transversion of the mutant T (or mutant A) results in a change of the amino acid encoded by the mutant codon. In some embodiments, the transversion of the mutant T (or mutant A) results in the codon encoding the wild-type amino acid. In some embodiments, the contacting is in vivo in a subject. In some embodiments, the subject has or has been diagnosed with a disease, disorder, or condition. In some embodiments, the disease, disorder, or condition is sickle cell anemia, Fanconi anemia, ectodermal dysplasia skin fragility syndrome, lattice corneal dystrophy Type III, or Noonan syndrome.

[0347] Some embodiments provide methods for using the base editors provided herein. In some embodiments, the base editors are used to introduce a point mutation into a nucleic acid by or methylating a target A nucleobase. In some embodiments, the methylation of the target nucleobase results in the correction of a genetic defect, e.g., in the correction of a point mutation that leads to a loss of function in a gene product. In some embodiments, the genetic defect is associated with a disease, disorder, or condition, e.g., a lysosomal storage disorder or a metabolic disease, such as, for example, type I diabetes. In some embodiments, the methods provided herein are used to introduce a deactivating point mutation into a gene or allele that encodes a gene product that is associated with a disease, disorder, or condition. For example, in some embodiments, methods are provided herein that employ a DNA editing fusion protein to introduce a deactivating point mutation into an oncogene (e.g., in the treatment of a proliferative disease). A deactivating mutation may, in some embodiments, generate a premature stop codon in a coding sequence, which results in the expression of a truncated gene product, e.g., a truncated protein lacking the function of the full-length protein.

[0348] In some embodiments, the purpose of the methods provided herein is to restore the function of a dysfunctional gene via genome editing. The base editor proteins provided herein may be validated for gene editing-based human therapeutics in vitro, e.g., by correcting a disease-associated mutation in human cell culture. It will be understood by the skilled artisan that the base editor proteins provided herein, e.g., the fusion proteins comprising a nucleic acid programmable DNA binding protein (e.g., Cas9) and a nucleobase modification domain may be used to correct any single point T to A or A to T mutation. Methylation of the mutant A (or the A that is base-paired with the mutant T), followed by a round of replication, corrects the mutation.

[0349] The successful correction of point mutations in disease-associated genes and alleles opens up new strategies for gene correction with applications in therapeutics and basic research. Site-specific single-base modification systems like the disclosed fusions of a nucleic acid programmable DNA binding protein and an adenosine methyltransferase domain also have applications in “reverse” gene therapy, where certain gene functions are purposely suppressed or abolished. In these cases, site-specifically mutating residues that lead to inactivating mutations in a protein, or mutations that inhibit function of the protein may be used to abolish or inhibit protein function.

[0350] Methods of Treatment

[0351] The instant disclosure provides methods for the treatment of a subject diagnosed with a disease associated with or caused by a point mutation that can be corrected by a DNA editing fusion protein provided herein. For example, in some embodiments, a method is provided that comprises administering to a subject having such a disease, e.g., a cancer associated with a point mutation as described above, an effective amount of an adenosine methyltransferase fusion protein that corrects the point mutation or introduces a deactivating mutation into a disease-associated gene. In some embodiments, a method is provided that comprises administering to a subject having such a disease, e.g., a cancer associated with a point mutation as described above, an effective amount of an adenosine methyltransferase fusion protein that corrects the point mutation or introduces a deactivating mutation into a disease-associated gene. In some embodiments, the disease is a proliferative disease. In some embodiments, the disease is a genetic disease. In some embodiments, the disease is a neoplastic disease. In some embodiments, the disease is a metabolic disease. In some embodiments, the disease is a lysosomal storage disease. Other diseases that can be treated by correcting a point mutation or introducing a deactivating mutation into a disease-associated gene will be known to those of skill in the art, and the disclosure is not limited in this respect.

[0352] The instant disclosure provides methods for the treatment of additional diseases or disorders, e.g., diseases or disorders that are associated or caused by a point mutation that can be corrected by adenosine methyltransferase-mediated gene editing. Some such diseases are described herein, and additional suitable diseases that can be treated with the fusion proteins provided herein will be apparent to those of skill in the art based on the instant disclosure. Exemplary suitable diseases and disorders are listed below. It will be understood that the numbering of the specific positions or residues in the respective sequences depends on the particular protein and numbering scheme used. Numbering might be different, e.g., in precursors of a mature protein and the mature protein itself, and differences in sequences from species to species may affect numbering. One of skill in the art will be able to identify the respective residue in any homologous protein and in the respective encoding nucleic acid by methods well known in the art, e.g., by sequence alignment and determination of homologous residues. Exemplary suitable diseases and disorders include, without limitation: 2-methyl-3-hydroxybutyric aciduria; 3 beta-Hydroxysteroid dehydrogenase deficiency; 3-Methylglutaconic aciduria; 3-Oxo-5 alpha-steroid delta 4-dehydrogenase deficiency; 46,XY sex reversal, type 1, 3, and 5; 5-Oxoprolinase deficiency; 6-pyruvoyl-tetrahydropterin synthase deficiency; Aarskog syndrome; Aase syndrome; Achondrogenesis type 2; Achromatopsia 2 and 7; Acquired long QT syndrome; Acrocallosal syndrome, Schinzel type; Acrocapitofemoral dysplasia; Acrodysostosis 2, with or without hormone resistance; Acroerythrokeratoderma; Acromicric dysplasia; Acth-independent macronodular adrenal hyperplasia 2; Activated PI3K-delta syndrome; Acute intermittent porphyria; deficiency of Acyl-CoA dehydrogenase family, member 9; Adams-Oliver syndrome 5 and 6; Adenine phosphoribosyltransferase deficiency; Adenylate kinase deficiency; hemolytic anemia due to Adenylosuccinate lyase deficiency; Adolescent nephronophthisis; Renal-hepatic-pancreatic dysplasia; Meckel syndrome type 7; Adrenoleukodystrophy; Adult junctional epidermolysis bullosa; Epidermolysis bullosa, junctional, localisata variant; Adult neuronal ceroid lipofuscinosis; Adult neuronal ceroid lipofuscinosis; Adult onset ataxia with oculomotor apraxia; ADULT syndrome; Afibrinogenemia and congenital Afibrinogenemia; autosomal recessive Agammaglobulinemia 2; Age-related macular degeneration 3, 6, 11, and 12; Aicardi Goutieres syndromes 1, 4, and 5; Chilbain lupus 1; Alagille syndromes 1 and 2; Alexander disease; Alkaptonuria; Allan-Herndon-Dudley syndrome; Alopecia universalis congenital; Alpers encephalopathy; Alpha-1-antitrypsin deficiency; autosomal dominant, autosomal recessive, and X-linked recessive Alport syndromes; Alzheimer disease, familial, 3, with spastic paraparesis and apraxia; Alzheimer disease, types, 1, 3, and 4; hypocalcification type and hypomaturation type, IIA1 Amelogenesis imperfecta; Aminoacylase 1 deficiency; Amish infantile epilepsy syndrome; Amyloidogenic transthyretin amyloidosis; Amyloid Cardiomyopathy, Transthyretin-related; Cardiomyopathy; Amyotrophic lateral sclerosis types 1, 6, 15 (with or without frontotemporal dementia), 22 (with or without frontotemporal dementia), and 10; Frontotemporal dementia with TDP43 inclusions, TARDBP-related; Andermann syndrome; Andersen Tawil syndrome; Congenital long QT syndrome; Anemia, nonspherocytic hemolytic, due to G6PD deficiency; Angelman syndrome; Severe neonatal-onset encephalopathy with microcephaly; susceptibility to Autism, X-linked 3; Angiopathy, hereditary, with nephropathy, aneurysms, and muscle cramps; Angiotensin i-converting enzyme, benign serum increase; Aniridia, cerebellar ataxia, and mental retardation; Anonychia; Antithrombin III deficiency; Antley-Bixler syndrome with genital anomalies and disordered steroidogenesis; Aortic aneurysm, familial thoracic 4, 6, and 9; Thoracic aortic aneurysms and aortic dissections; Multisystemic smooth muscle dysfunction syndrome; Moyamoya disease 5; Aplastic anemia; Apparent mineralocorticoid excess; Arginase deficiency; Argininosuccinate lyase deficiency; Aromatase deficiency; Arrhythmogenic right ventricular cardiomyopathy types 5, 8, and 10; Primary familial hypertrophic cardiomyopathy; Arthrogryposis multiplex congenita, distal, X-linked; Arthrogryposis renal dysfunction cholestasis syndrome; Arthrogryposis, renal dysfunction, and cholestasis 2; Asparagine synthetase deficiency; Abnormality of neuronal migration; Ataxia with vitamin E deficiency; Ataxia, sensory, autosomal dominant; Ataxia-telangiectasia syndrome; Hereditary cancer-predisposing syndrome; Atransferrinemia; Atrial fibrillation, familial, 11, 12, 13, and 16; Atrial septal defects 2, 4, and 7 (with or without atrioventricular conduction defects); Atrial standstill 2; Atrioventricular septal defect 4; Atrophia bulborum hereditaria; ATR-X syndrome; Auriculocondylar syndrome 2; Autoimmune disease, multisystem, infantile-onset; Autoimmune lymphoproliferative syndrome, type 1a; Autosomal dominant hypohidrotic ectodermal dysplasia; Autosomal dominant progressive external ophthalmoplegia with mitochondrial DNA deletions 1 and 3; Autosomal dominant torsion dystonia 4; Autosomal recessive centronuclear myopathy; Autosomal recessive congenital ichthyosis 1, 2, 3, 4A, and 4B; Autosomal recessive cutis laxa type IA and 1B; Autosomal recessive hypohidrotic ectodermal dysplasia syndrome; Ectodermal dysplasia 11b; hypohidrotic/hair/tooth type, autosomal recessive; Autosomal recessive hypophosphatemic bone disease; Axenfeld-Rieger syndrome type 3; Bainbridge-Ropers syndrome; Bannayan-Riley-Ruvalcaba syndrome; PTEN hamartoma tumor syndrome; Baraitser-Winter syndromes 1 and 2; Barakat syndrome; Bardet-Biedl syndromes 1, 11, 16, and 19; Bare lymphocyte syndrome type 2, complementation group E; Bartter syndrome antenatal type 2; Bartter syndrome types 3, 3 with hypocalciuria, and 4; Basal ganglia calcification, idiopathic, 4; Beaded hair; Benign familial hematuria; Benign familial neonatal seizures 1 and 2; Seizures, benign familial neonatal, 1, and/or myokymia; Seizures, Early infantile epileptic encephalopathy 7; Benign familial neonatal-infantile seizures; Benign hereditary chorea; Benign scapuloperoneal muscular dystrophy with cardiomyopathy; Bernard-Soulier syndrome, types A1 and A2 (autosomal dominant); Bestrophinopathy, autosomal recessive; beta Thalassemia; Bethlem myopathy and Bethlem myopathy 2; Bietti crystalline corneoretinal dystrophy; Bile acid synthesis defect, congenital, 2; Biotinidase deficiency; Birk Barel mental retardation dysmorphism syndrome; Blepharophimosis, ptosis, and epicanthus inversus; Bloom syndrome; Borjeson-Forssman-Lehmann syndrome; Boucher Neuhauser syndrome; Brachydactyly types A1 and A2; Brachydactyly with hypertension; Brain small vessel disease with hemorrhage; Branched-chain ketoacid dehydrogenase kinase deficiency; Branchiootic syndromes 2 and 3; Breast cancer, early-onset; Breast-ovarian cancer, familial 1, 2, and 4; Brittle cornea syndrome 2; Brody myopathy; Bronchiectasis with or without elevated sweat chloride 3; Brown-Vialetto-Van laere syndrome and Brown-Vialetto-Van Laere syndrome 2; Brugada syndrome; Brugada syndrome 1; Ventricular fibrillation; Paroxysmal familial ventricular fibrillation; Brugada syndrome and Brugada syndrome 4; Long QT syndrome; Sudden cardiac death; Bull eye macular dystrophy; Stargardt disease 4; Cone-rod dystrophy 12; Bullous ichthyosiform erythroderma; Burn-Mckeown syndrome; Candidiasis, familial, 2, 5, 6, and 8; Carbohydrate-deficient glycoprotein syndrome type I and II; Carbonic anhydrase VA deficiency, hyperammonemia due to; Carcinoma of colon; Cardiac arrhythmia; Long QT syndrome, LQT1 subtype; Cardioencephalomyopathy, fatal infantile, due to cytochrome c oxidase deficiency; Cardiofaciocutaneous syndrome; Cardiomyopathy; Danon disease; Hypertrophic cardiomyopathy; Left ventricular noncompaction cardiomyopathy; Carnevale syndrome; Carney complex, type 1; Carnitine acylcarnitine translocase deficiency; Carnitine palmitoyltransferase I, II, II (late onset), and II (infantile) deficiency; Cataract 1, 4, autosomal dominant, autosomal dominant, multiple types, with microcornea, coppock-like, juvenile, with microcornea and glucosuria, and nuclear diffuse nonprogressive; Catecholaminergic polymorphic ventricular tachycardia; Caudal regression syndrome; Cd8 deficiency, familial; Central core disease; Centromeric instability of chromosomes 1,9 and 16 and immunodeficiency; Cerebellar ataxia infantile with progressive external ophthalmoplegi and Cerebellar ataxia, mental retardation, and dysequilibrium syndrome 2; Cerebral amyloid angiopathy, APP-related; Cerebral autosomal dominant and recessive arteriopathy with subcortical infarcts and leukoencephalopathy; Cerebral cavernous malformations 2; Cerebrooculofacioskeletal syndrome 2; Cerebro-oculo-facio-skeletal syndrome; Cerebroretinal microangiopathy with calcifications and cysts; Ceroid lipofuscinosis neuronal 2, 6, 7, and 10; Ch\xc3\xa9diak-Higashi syndrome, Chediak-Higashi syndrome, adult type; Charcot-Marie-Tooth disease types 1B, 2B2, 2C, 2F, 2I, 2U (axonal), 1C (demyelinating), dominant intermediate C, recessive intermediate A, 2A2, 4C, 4D, 4H, IF, IVF, and X; Scapuloperoneal spinal muscular atrophy; Distal spinal muscular atrophy, congenital nonprogressive; Spinal muscular atrophy, distal, autosomal recessive, 5; CHARGE association; Childhood hypophosphatasia; Adult hypophosphatasia; Cholecystitis; Progressive familial intrahepatic cholestasis 3; Cholestasis, intrahepatic, of pregnancy 3; Cholestanol storage disease; Cholesterol monooxygenase (side-chain cleaving) deficiency; Chondrodysplasia Blomstrand type; Chondrodysplasia punctata 1, X-linked recessive and 2 X-linked dominant; CHOPS syndrome; Chronic granulomatous disease, autosomal recessive cytochrome b-positive, types 1 and 2; Chudley-McCullough syndrome; Ciliary dyskinesia, primary, 7, 11, 15, 20 and 22; Citrullinemia type I; Citrullinemia type I and II; Cleidocranial dysostosis; C-like syndrome; Cockayne syndrome type A; Coenzyme Q10 deficiency, primary 1, 4, and 7; Coffin Siris/Intellectual Disability; Coffin-Lowry syndrome; Cohen syndrome; Cold-induced sweating syndrome 1; COLE-CARPENTER SYNDROME 2; Combined cellular and humoral immune defects with granulomas; Combined d-2- and 1-2-hydroxyglutaric aciduria; Combined malonic and methylmalonic aciduria; Combined oxidative phosphorylation deficiencies 1, 3, 4, 12, 15, and 25; Combined partial and complete 17-alpha-hydroxylase/17,20-lyase deficiency; Common variable immunodeficiency 9; Complement component 4, partial deficiency of, due to dysfunctional c1 inhibitor; Complement factor B deficiency; Cone monochromatism; Cone-rod dystrophy 2 and 6; Cone-rod dystrophy amelogenesis imperfecta; Congenital adrenal hyperplasia and Congenital adrenal hypoplasia, X-linked; Congenital amegakaryocytic thrombocytopenia; Congenital aniridia; Congenital central hypoventilation; Hirschsprung disease 3; Congenital contractural arachnodactyly; Congenital contractures of the limbs and face, hypotonia, and developmental delay; Congenital disorder of glycosylation types 1B, 1D, 1G, 1H, 1J, 1K, 1N, 1P, 2C, 2J, 2K, IIm; Congenital dyserythropoietic anemia, type I and II; Congenital ectodermal dysplasia of face; Congenital erythropoietic porphyria; Congenital generalized lipodystrophy type 2; Congenital heart disease, multiple types, 2; Congenital heart disease; Interrupted aortic arch; Congenital lipomatous overgrowth, vascular malformations, and epidermal nevi; Non-small cell lung cancer; Neoplasm of ovary; Cardiac conduction defect, nonspecific; Congenital microvillous atrophy; Congenital muscular dystrophy; Congenital muscular dystrophy due to partial LAMA2 deficiency; Congenital muscular dystrophy-dystroglycanopathy with brain and eye anomalies, types A2, A7, A8, A11, and A14; Congenital muscular dystrophy-dystroglycanopathy with mental retardation, types B2, B3, B5, and B15; Congenital muscular dystrophy-dystroglycanopathy without mental retardation, type B5; Congenital muscular hypertrophy-cerebral syndrome; Congenital myasthenic syndrome, acetazolamide-responsive; Congenital myopathy with fiber type disproportion; Congenital ocular coloboma; Congenital stationary night blindness, type 1A, 1B, 1C, 1E, 1F, and 2A; Coproporphyria; Cornea plana 2; Corneal dystrophy, Fuchs endothelial, 4; Corneal endothelial dystrophy type 2; Corneal fragility keratoglobus, blue sclerae and joint hypermobility; Cornelia de Lange syndromes 1 and 5; Coronary artery disease, autosomal dominant 2; Coronary heart disease; Hyperalphalipoproteinemia 2; Cortical dysplasia, complex, with other brain malformations 5 and 6; Cortical malformations, occipital; Corticosteroid-binding globulin deficiency; Corticosterone methyloxidase type 2 deficiency; Costello syndrome; Cowden syndrome 1; Coxa plana; Craniodiaphyseal dysplasia, autosomal dominant; Craniosynostosis 1 and 4; Craniosynostosis and dental anomalies; Creatine deficiency, X-linked; Crouzon syndrome; Cryptophthalmos syndrome; Cryptorchidism, unilateral or bilateral; Cushing symphalangism; Cutaneous malignant melanoma 1; Cutis laxa with osteodystrophy and with severe pulmonary, gastrointestinal, and urinary abnormalities; Cyanosis, transient neonatal and atypical nephropathic; Cystic fibrosis; Cystinuria; Cytochrome c oxidase i deficiency; Cytochrome-c oxidase deficiency; D-2-hydroxyglutaric aciduria 2; Darier disease, segmental; Deafness with labyrinthine aplasia microtia and microdontia (LAMM); Deafness, autosomal dominant 3a, 4, 12, 13, 15, autosomal dominant nonsyndromic sensorineural 17, 20, and 65; Deafness, autosomal recessive 1A, 2, 3, 6, 8, 9, 12, 15, 16, 18b, 22, 28, 31, 44, 49, 63, 77, 86, and 89; Deafness, cochlear, with myopia and intellectual impairment, without vestibular involvement, autosomal dominant, X-linked 2; Deficiency of 2-methylbutyryl-CoA dehydrogenase; Deficiency of 3-hydroxyacyl-CoA dehydrogenase; Deficiency of alpha-mannosidase; Deficiency of aromatic-L-amino-acid decarboxylase; Deficiency of bisphosphoglycerate mutase; Deficiency of butyryl-CoA dehydrogenase; Deficiency of ferroxidase; Deficiency of galactokinase; Deficiency of guanidinoacetate methyltransferase; Deficiency of hyaluronoglucosaminidase; Deficiency of ribose-5-phosphate isomerase; Deficiency of steroid 11-beta-monooxygenase; Deficiency of UDPglucose-hexose-1-phosphate uridylyltransferase; Deficiency of xanthine oxidase; Dejerine-Sottas disease; Charcot-Marie-Tooth disease, types ID and IVF; Dejerine-Sottas syndrome, autosomal dominant; Dendritic cell, monocyte, B lymphocyte, and natural killer lymphocyte deficiency; Desbuquois dysplasia 2; Desbuquois syndrome; DFNA 2 Nonsyndromic Hearing Loss; Diabetes mellitus and insipidus with optic atrophy and deafness; Diabetes mellitus, type 2, and insulin-dependent, 20; Diamond-Blackfan anemia 1, 5, 8, and 10; Diarrhea 3 (secretory sodium, congenital, syndromic) and 5 (with tufting enteropathy, congenital); Dicarboxylic aminoaciduria; Diffuse palmoplantar keratoderma, Bothnian type; Digitorenocerebral syndrome; Dihydropteridine reductase deficiency; Dilated cardiomyopathy 1A, 1AA, 1C, 1G, 1BB, 1DD, 1FF, 1HH, 1I, 1KK, 1N, 1S, 1Y, and 3B; Left ventricular noncompaction 3; Disordered steroidogenesis due to cytochrome p450 oxidoreductase deficiency; Distal arthrogryposis type 2B; Distal hereditary motor neuronopathy type 2B; Distal myopathy Markesbery-Griggs type; Distal spinal muscular atrophy, X-linked 3; Distichiasis-lymphedema syndrome; Dominant dystrophic epidermolysis bullosa with absence of skin; Dominant hereditary optic atrophy; Donnai Barrow syndrome; Dopamine beta hydroxylase deficiency; Dopamine receptor d2, reduced brain density of; Dowling-degos disease 4; Doyne honeycomb retinal dystrophy; Malattia leventinese; Duane syndrome type 2; Dubin-Johnson syndrome; Duchenne muscular dystrophy; Becker muscular dystrophy; Dysfibrinogenemia; Dyskeratosis congenita autosomal dominant and autosomal dominant, 3; Dyskeratosis congenita, autosomal recessive, 1, 3, 4, and 5; Dyskeratosis congenita X-linked; Dyskinesia, familial, with facial myokymia; Dysplasminogenemia; Dystonia 2 (torsion, autosomal recessive), 3 (torsion, X-linked), 5 (Dopa-responsive type), 10, 12, 16, 25, 26 (Myoclonic); Seizures, benign familial infantile, 2; Early infantile epileptic encephalopathy 2, 4, 7, 9, 10, 11, 13, and 14; Atypical Rett syndrome; Early T cell progenitor acute lymphoblastic leukemia; Ectodermal dysplasia skin fragility syndrome; Ectodermal dysplasia-syndactyly syndrome 1; Ectopia lentis, isolated autosomal recessive and dominant; Ectrodactyly, ectodermal dysplasia, and cleft lip/palate syndrome 3; Ehlers-Danlos syndrome type 7 (autosomal recessive), classic type, type 2 (progeroid), hydroxylysine-deficient, type 4, type 4 variant, and due to tenascin-X deficiency; Eichsfeld type congenital muscular dystrophy; Endocrine-cerebroosteodysplasia; Enhanced s-cone syndrome; Enlarged vestibular aqueduct syndrome; Enterokinase deficiency; Epidermodysplasia verruciformis; Epidermolysa bullosa simplex and limb girdle muscular dystrophy, simplex with mottled pigmentation, simplex with pyloric atresia, simplex, autosomal recessive, and with pyloric atresia; Epidermolytic palmoplantar keratoderma; Familial febrile seizures 8; Epilepsy, childhood absence 2, 12 (idiopathic generalized, susceptibility to) 5 (nocturnal frontal lobe), nocturnal frontal lobe type 1, partial, with variable foci, progressive myoclonic 3, and X-linked, with variable learning disabilities and behavior disorders; Epileptic encephalopathy, childhood-onset, early infantile, 1, 19, 23, 25, 30, and 32; Epiphyseal dysplasia, multiple, with myopia and conductive deafness; Episodic ataxia type 2; Episodic pain syndrome, familial, 3; Epstein syndrome; Fechtner syndrome; Erythropoietic protoporphyria; Estrogen resistance; Exudative vitreoretinopathy 6; Fabry disease and Fabry disease, cardiac variant; Factor H, VII, X, v and factor viii, combined deficiency of 2, xiii, a subunit, deficiency; Familial adenomatous polyposis 1 and 3; Familial amyloid nephropathy with urticaria and deafness; Familial cold urticarial; Familial aplasia of the vermis; Familial benign pemphigus; Familial cancer of breast; Breast cancer, susceptibility to; Osteosarcoma; Pancreatic cancer 3; Familial cardiomyopathy; Familial cold autoinflammatory syndrome 2; Familial colorectal cancer; Familial exudative vitreoretinopathy, X-linked; Familial hemiplegic migraine types 1 and 2; Familial hypercholesterolemia; Familial hypertrophic cardiomyopathy 1, 2, 3, 4, 7, 10, 23 and 24; Familial hypokalemia-hypomagnesemia; Familial hypoplastic, glomerulocystic kidney; Familial infantile myasthenia; Familial juvenile gout; Familial Mediterranean fever and Familial mediterranean fever, autosomal dominant; Familial porencephaly; Familial porphyria cutanea tarda; Familial pulmonary capillary hemangiomatosis; Familial renal glucosuria; Familial renal hypouricemia; Familial restrictive cardiomyopathy 1; Familial type 1 and 3 hyperlipoproteinemia; Fanconi anemia, complementation group E, I, N, and O; Fanconi-Bickel syndrome; Favism, susceptibility to; Febrile seizures, familial, 11; Feingold syndrome 1; Fetal hemoglobin quantitative trait locus 1; FG syndrome and FG syndrome 4; Fibrosis of extraocular muscles, congenital, 1, 2, 3a (with or without extraocular involvement), 3b; Fish-eye disease; Fleck corneal dystrophy; Floating-Harbor syndrome; Focal epilepsy with speech disorder with or without mental retardation; Focal segmental glomerulosclerosis 5; Forebrain defects; Frank Ter Haar syndrome; Borrone Di Rocco Crovato syndrome; Frasier syndrome; Wilms tumor 1; Freeman-Sheldon syndrome; Frontometaphyseal dysplasia land 3; Frontotemporal dementia; Frontotemporal dementia and/or amyotrophic lateral sclerosis 3 and 4; Frontotemporal Dementia Chromosome 3-Linked and Frontotemporal dementia ubiquitin-positive; Fructose-biphosphatase deficiency; Fuhrmann syndrome; Gamma-aminobutyric acid transaminase deficiency; Gamstorp-Wohlfart syndrome; Gaucher disease type 1 and Subacute neuronopathic; Gaze palsy, familial horizontal, with progressive scoliosis; Generalized dominant dystrophic epidermolysis bullosa; Generalized epilepsy with febrile seizures plus 3, type 1, type 2; Epileptic encephalopathy Lennox-Gastaut type; Giant axonal neuropathy; Glanzmann thrombasthenia; Glaucoma 1, open angle, e, F, and G; Glaucoma 3, primary congenital, d; Glaucoma, congenital and Glaucoma, congenital, Coloboma; Glaucoma, primary open angle, juvenile-onset; Glioma susceptibility 1; Glucose transporter type 1 deficiency syndrome; Glucose-6-phosphate transport defect; GLUT1 deficiency syndrome 2; Epilepsy, idiopathic generalized, susceptibility to, 12; Glutamate formiminotransferase deficiency; Glutaric acidemia IIA and IIB; Glutaric aciduria, type 1; Gluthathione synthetase deficiency; Glycogen storage disease 0 (muscle), II (adult form), IXa2, IXc, type 1A; type II, type IV, IV (combined hepatic and myopathic), type V, and type VI; Goldmann-Favre syndrome; Gordon syndrome; Gorlin syndrome; Holoprosencephaly sequence; Holoprosencephaly 7; Granulomatous disease, chronic, X-linked, variant; Granulosa cell tumor of the ovary; Gray platelet syndrome; Griscelli syndrome type 3; Groenouw corneal dystrophy type I; Growth and mental retardation, mandibulofacial dysostosis, microcephaly, and cleft palate; Growth hormone deficiency with pituitary anomalies; Growth hormone insensitivity with immunodeficiency; GTP cyclohydrolase I deficiency; Hajdu-Cheney syndrome; Hand foot uterus syndrome; Hearing impairment; Hemangioma, capillary infantile; Hematologic neoplasm; Hemochromatosis type 1, 2B, and 3; Microvascular complications of diabetes 7; Transferrin serum level quantitative trait locus 2; Hemoglobin H disease, nondeletional; Hemolytic anemia, nonspherocytic, due to glucose phosphate isomerase deficiency; Hemophagocytic lymphohistiocytosis, familial, 2; Hemophagocytic lymphohistiocytosis, familial, 3; Heparin cofactor II deficiency; Hereditary acrodermatitis enteropathica; Hereditary breast and ovarian cancer syndrome; Ataxia-telangiectasia-like disorder; Hereditary diffuse gastric cancer; Hereditary diffuse leukoencephalopathy with spheroids; Hereditary factors II, IX, VIII deficiency disease; Hereditary hemorrhagic telangiectasia type 2; Hereditary insensitivity to pain with anhidrosis; Hereditary lymphedema type I; Hereditary motor and sensory neuropathy with optic atrophy; Hereditary myopathy with early respiratory failure; Hereditary neuralgic amyotrophy; Hereditary Nonpolyposis Colorectal Neoplasms; Lynch syndrome I and II; Hereditary pancreatitis; Pancreatitis, chronic, susceptibility to; Hereditary sensory and autonomic neuropathy type IIB amd IIA; Hereditary sideroblastic anemia; Hermansky-Pudlak syndrome 1, 3, 4, and 6; Heterotaxy, visceral, 2, 4, and 6, autosomal; Heterotaxy, visceral, X-linked; Heterotopia; Histiocytic medullary reticulosis; Histiocytosis-lymphadenopathy plus syndrome; Holocarboxylase synthetase deficiency; Holoprosencephaly 2, 3, 7, and 9; Holt-Oram syndrome; Homocysteinemia due to MTHFR deficiency, CBS deficiency, and Homocystinuria, pyridoxine-responsive; Homocystinuria-Megaloblastic anemia due to defect in cobalamin metabolism, cblE complementation type; Howel-Evans syndrome; Hurler syndrome; Hutchinson-Gilford syndrome; Hydrocephalus; Hyperammonemia, type III; Hypercholesterolaemia and Hypercholesterolemia, autosomal recessive; Hyperekplexia 2 and Hyperekplexia hereditary; Hyperferritinemia cataract syndrome; Hyperglycinuria; Hyperimmunoglobulin D with periodic fever; Mevalonic aciduria; Hyperimmunoglobulin E syndrome; Hyperinsulinemic hypoglycemia familial 3, 4, and 5; Hyperinsulinism-hyperammonemia syndrome; Hyperlysinemia; Hypermanganesemia with dystonia, polycythemia and cirrhosis; Hyperornithinemia-hyperammonemia-homocitrullinuria syndrome; Hyperparathyroidism 1 and 2; Hyperparathyroidism, neonatal severe; Hyperphenylalaninemia, bh4-deficient, a, due to partial pts deficiency, BH4-deficient, D, and non-pku; Hyperphosphatasia with mental retardation syndrome 2, 3, and 4; Hypertrichotic osteochondrodysplasia; Hypobetalipoproteinemia, familial, associated with apob32; Hypocalcemia, autosomal dominant 1; Hypocalciuric hypercalcemia, familial, types 1 and 3; Hypochondrogenesis; Hypochromic microcytic anemia with iron overload; Hypoglycemia with deficiency of glycogen synthetase in the liver; Hypogonadotropic hypogonadism 11 with or without anosmia; Hypohidrotic ectodermal dysplasia with immune deficiency; Hypohidrotic X-linked ectodermal dysplasia; Hypokalemic periodic paralysis 1 and 2; Hypomagnesemia 1, intestinal; Hypomagnesemia, seizures, and mental retardation; Hypomyelinating leukodystrophy 7; Hypoplastic left heart syndrome; Atrioventricular septal defect and common atrioventricular junction; Hypospadias 1 and 2, X-linked; Hypothyroidism, congenital, nongoitrous, 1; Hypotrichosis 8 and 12; Hypotrichosis-lymphedema-telangiectasia syndrome; I blood group system; Ichthyosis bullosa of Siemens; Ichthyosis exfoliativa; Ichthyosis prematurity syndrome; Idiopathic basal ganglia calcification 5; Idiopathic fibrosing alveolitis, chronic form; Dyskeratosis congenita, autosomal dominant, 2 and 5; Idiopathic hypercalcemia of infancy; Immune dysfunction with T-cell inactivation due to calcium entry defect 2; Immunodeficiency 15, 16, 19, 30, 31C, 38, 40, 8, due to defect in cd3-zeta, with hyper IgM type 1 and 2, and X-Linked, with magnesium defect, Epstein-Barr virus infection, and neoplasia; Immunodeficiency-centromeric instability-facial anomalies syndrome 2; Inclusion body myopathy 2 and 3; Nonaka myopathy; Infantile convulsions and paroxysmal choreoathetosis, familial; Infantile cortical hyperostosis; Infantile GM1 gangliosidosis; Infantile hypophosphatasia; Infantile nephronophthisis; Infantile nystagmus, X-linked; Infantile Parkinsonism-dystonia; Infertility associated with multi-tailed spermatozoa and excessive DNA; Insulin resistance; Insulin-resistant diabetes mellitus and acanthosis nigricans; Insulin-dependent diabetes mellitus secretory diarrhea syndrome; Interstitial nephritis, karyomegalic; Intrauterine growth retardation, metaphyseal dysplasia, adrenal hypoplasia congenita, and genital anomalies; lodotyrosyl coupling defect; IRAK4 deficiency; Iridogoniodysgenesis dominant type and type 1; Iron accumulation in brain; Ischiopatellar dysplasia; Islet cell hyperplasia; Isolated 17,20-lyase deficiency; Isolated lutropin deficiency; Isovaleryl-CoA dehydrogenase deficiency; Jankovic Rivera syndrome; Jervell and Lange-Nielsen syndrome 2; Joubert syndrome 1, 6, 7, 9/15 (digenic), 14, 16, and 17, and Orofaciodigital syndrome xiv; Junctional epidermolysis bullosa gravis of Herlitz; Juvenile GM>1<gangliosidosis; Juvenile polyposis syndrome; Juvenile polyposis/hereditary hemorrhagic telangiectasia syndrome; Juvenile retinoschisis; Kabuki make-up syndrome; Kallmann syndrome 1, 2, and 6; Delayed puberty; Kanzaki disease; Karak syndrome; Kartagener syndrome; Kenny-Caffey syndrome type 2; Keppen-Lubinsky syndrome; Keratoconus 1; Keratosis follicularis; Keratosis palmoplantaris striata 1; Kindler syndrome; L-2-hydroxyglutaric aciduria; Larsen syndrome, dominant type; Lattice corneal dystrophy Type III; Leber amaurosis; Zellweger syndrome; Peroxisome biogenesis disorders; Zellweger syndrome spectrum; Leber congenital amaurosis 11, 12, 13, 16, 4, 7, and 9; Leber optic atrophy; Aminoglycoside-induced deafness; Deafness, nonsyndromic sensorineural, mitochondrial; Left ventricular noncompaction 5; Left-right axis malformations; Leigh disease; Mitochondrial short-chain Enoyl-CoA Hydratase 1 deficiency; Leigh syndrome due to mitochondrial complex I deficiency; Leiner disease; Leri Weill dyschondrosteosis; Lethal congenital contracture syndrome 6; Leukocyte adhesion deficiency type I and III; Leukodystrophy, Hypomyelinating, 11 and 6; Leukoencephalopathy with ataxia, with Brainstem and Spinal Cord Involvement and Lactate Elevation, with vanishing white matter, and progressive, with ovarian failure; Leukonychia totalis; Lewy body dementia; Lichtenstein-Knorr Syndrome; Li-Fraumeni syndrome 1; Lig4 syndrome; Limb-girdle muscular dystrophy, type 1B, 2A, 2B, 2D, C1, C5, C9, C14; Congenital muscular dystrophy-dystroglycanopathy with brain and eye anomalies, type A14 and B14; Lipase deficiency combined; Lipid proteinosis; Lipodystrophy, familial partial, type 2 and 3; Lissencephaly 1, 2 (X-linked), 3, 6 (with microcephaly), X-linked; Subcortical laminar heterotopia, X-linked; Liver failure acute infantile; Loeys-Dietz syndrome 1, 2, 3; Long QT syndrome 1, 2, 2/9, 2/5, (digenic), 3, 5 and 5, acquired, susceptibility to; Lung cancer; Lymphedema, hereditary, id; Lymphedema, primary, with myelodysplasia; Lymphoproliferative syndrome 1, 1 (X-linked), and 2; Lysosomal acid lipase deficiency; Macrocephaly, macrosomia, facial dysmorphism syndrome; Macular dystrophy, vitelliform, adult-onset; Malignant hyperthermia susceptibility type 1; Malignant lymphoma, non-Hodgkin; Malignant melanoma; Malignant tumor of prostate; Mandibuloacral dysostosis; Mandibuloacral dysplasia with type A or B lipodystrophy, atypical; Mandibulofacial dysostosis, Treacher Collins type, autosomal recessive; Mannose-binding protein deficiency; Maple syrup urine disease type 1A and type 3; Marden Walker like syndrome; Marfan syndrome; Marinesco-Sj\xc3\xb6gren syndrome; Martsolf syndrome; Maturity-onset diabetes of the young, type 1, type 2, type 11, type 3, and type 9; May-Hegglin anomaly; MYH9 related disorders; Sebastian syndrome; McCune-Albright syndrome; Somatotroph adenoma; Sex cord-stromal tumor; Cushing syndrome; McKusick Kaufman syndrome; McLeod neuroacanthocytosis syndrome; Meckel-Gruber syndrome; Medium-chain acyl-coenzyme A dehydrogenase deficiency; Medulloblastoma; Megalencephalic leukoencephalopathy with subcortical cysts land 2a; Megalencephaly cutis marmorata telangiectatica congenital; PIK3CA Related Overgrowth Spectrum; Megalencephaly-polymicrogyria-polydactyly-hydrocephalus syndrome 2; Megaloblastic anemia, thiamine-responsive, with diabetes mellitus and sensorineural deafness; Meier-Gorlin syndromes land 4; Melnick-Needles syndrome; Meningioma; Mental retardation, X-linked, 3, 21, 30, and 72; Mental retardation and microcephaly with pontine and cerebellar hypoplasia; Mental retardation X-linked syndromic 5; Mental retardation, anterior maxillary protrusion, and strabismus; Mental retardation, autosomal dominant 12, 13, 15, 24, 3, 30, 4, 5, 6, and 9; Mental retardation, autosomal recessive 15, 44, 46, and 5; Mental retardation, stereotypic movements, epilepsy, and/or cerebral malformations; Mental retardation, syndromic, Claes-Jensen type, X-linked; Mental retardation, X-linked, nonspecific, syndromic, Hedera type, and syndromic, wu type; Merosin deficient congenital muscular dystrophy; Metachromatic leukodystrophy juvenile, late infantile, and adult types; Metachromatic leukodystrophy; Metatrophic dysplasia; Methemoglobinemia types I and 2; Methionine adenosyltransferase deficiency, autosomal dominant; Methylmalonic acidemia with homocystinuria; Methylmalonic aciduria cb1B type; Methylmalonic aciduria due to methylmalonyl-CoA mutase deficiency; METHYLMALONIC ACIDURIA, mut(0) TYPE; Microcephalic osteodysplastic primordial dwarfism type 2; Microcephaly with or without chorioretinopathy, lymphedema, or mental retardation; Microcephaly, hiatal hernia and nephrotic syndrome; Microcephaly; Hypoplasia of the corpus callosum; Spastic paraplegia 50, autosomal recessive; Global developmental delay; CNS hypomyelination; Brain atrophy; Microcephaly, normal intelligence and immunodeficiency; Microcephaly-capillary malformation syndrome; Microcytic anemia; Microphthalmia syndromic 5, 7, and 9; Microphthalmia, isolated 3, 5, 6, 8, and with coloboma 6; Microspherophakia; Migraine, familial basilar; Miller syndrome; Minicore myopathy with external ophthalmoplegia; Myopathy, congenital with cores; Mitchell-Riley syndrome; mitochondrial 3-hydroxy-3-methylglutaryl-CoA synthase deficiency; Mitochondrial complex I, II, III, III (nuclear type 2, 4, or 8) deficiency; Mitochondrial DNA depletion syndrome 11, 12 (cardiomyopathic type), 2, 4B (MNGIE type), 8B (MNGIE type); Mitochondrial DNA-depletion syndrome 3 and 7, hepatocerebral types, and 13 (encephalomyopathic type); Mitochondrial phosphate carrier and pyruvate carrier deficiency; Mitochondrial trifunctional protein deficiency; Long-chain 3-hydroxyacyl-CoA dehydrogenase deficiency; Miyoshi muscular dystrophy 1; Myopathy, distal, with anterior tibial onset; Mohr-Tranebjaerg syndrome; Molybdenum cofactor deficiency, complementation group A; Mowat-Wilson syndrome; Mucolipidosis III Gamma; Mucopolysaccharidosis type VI, type VI (severe), and type VII; Mucopolysaccharidosis, MPS-I-H/S, MPS-II, MPS-III-A, MPS-III-B, MPS-III-C, MPS-IV-A, MPS—IV-B; Retinitis Pigmentosa 73; Gangliosidosis GM1 typel (with cardiac involvenment) 3; Multicentric osteolysis nephropathy; Multicentric osteolysis, nodulosis and arthropathy; Multiple congenital anomalies; Atrial septal defect 2; Multiple congenital anomalies-hypotonia-seizures syndrome 3; Multiple Cutaneous and Mucosal Venous Malformations; Multiple endocrine neoplasia, types land 4; Multiple epiphyseal dysplasia 5 or Dominant; Multiple gastrointestinal atresias; Multiple pterygium syndrome Escobar type; Multiple sulfatase deficiency; Multiple synostoses syndrome 3; Muscle AMP thymine alkyltransferase deficiency; Muscle eye brain disease; Muscular dystrophy, congenital, megaconial type; Myasthenia, familial infantile, 1; Myasthenic Syndrome, Congenital, 11, associated with acetylcholine receptor deficiency; Myasthenic Syndrome, Congenital, 17, 2A (slow-channel), 4B (fast-channel), and without tubular aggregates; Myeloperoxidase deficiency; MYH-associated polyposis; Endometrial carcinoma; Myocardial infarction 1; Myoclonic dystonia; Myoclonic-Atonic Epilepsy; Myoclonus with epilepsy with ragged red fibers; Myofibrillar myopathy 1 and ZASP-related; Myoglobinuria, acute recurrent, autosomal recessive; Myoneural gastrointestinal encephalopathy syndrome; Cerebellar ataxia infantile with progressive external ophthalmoplegia; Mitochondrial DNA depletion syndrome 4B, MNGIE type; Myopathy, centronuclear, 1, congenital, with excess of muscle spindles, distal, 1, lactic acidosis, and sideroblastic anemia 1, mitochondrial progressive with congenital cataract, hearing loss, and developmental delay, and tubular aggregate, 2; Myopia 6; Myosclerosis, autosomal recessive; Myotonia congenital; Congenital myotonia, autosomal dominant and recessive forms; Nail-patella syndrome; Nance-Horan syndrome; Nanophthalmos 2; Navajo neurohepatopathy; Nemaline myopathy 3 and 9; Neonatal hypotonia; Intellectual disability; Seizures; Delayed speech and language development; Mental retardation, autosomal dominant 31; Neonatal intrahepatic cholestasis caused by citrin deficiency; Nephrogenic diabetes insipidus, Nephrogenic diabetes insipidus, X-linked; Nephrolithiasis/osteoporosis, hypophosphatemic, 2; Nephronophthisis 13, 15 and 4; Infertility; Cerebello-oculo-renal syndrome (nephronophthisis, oculomotor apraxia and cerebellar abnormalities); Nephrotic syndrome, type 3, type 5, with or without ocular abnormalities, type 7, and type 9; Nestor-Guillermo progeria syndrome; Neu-Laxova syndrome 1; Neurodegeneration with brain iron accumulation 4 and 6; Neuroferritinopathy; Neurofibromatosis, type land type 2; Neurofibrosarcoma; Neurohypophyseal diabetes insipidus; Neuropathy, Hereditary Sensory, Type IC; Neutral 1 amino acid transport defect; Neutral lipid storage disease with myopathy; Neutrophil immunodeficiency syndrome; Nicolaides-Baraitser syndrome; Niemann-Pick disease type C1, C2, type A, and type C1, adult form; Non-ketotic hyperglycinemia; Noonan syndrome 1 and 4, LEOPARD syndrome 1; Noonan syndrome-like disorder with or without juvenile myelomonocytic leukemia; Normokalemic periodic paralysis, potassium-sensitive; Norum disease; Epilepsy, Hearing Loss, And Mental Retardation Syndrome; Mental Retardation, X-Linked 102 and syndromic 13; Obesity; Ocular albinism, type I; Oculocutaneous albinism type 1B, type 3, and type 4; Oculodentodigital dysplasia; Odontohypophosphatasia; Odontotrichomelic syndrome; Oguchi disease; Oligodontia-colorectal cancer syndrome; Opitz G/BBB syndrome; Optic atrophy 9; Oral-facial-digital syndrome; Ornithine aminotransferase deficiency; Orofacial cleft 11 and 7, Cleft lip/palate-ectodermal dysplasia syndrome; Orstavik Lindemann Solberg syndrome; Osteoarthritis with mild chondrodysplasia; Osteochondritis dissecans; Osteogenesis imperfecta type 12, type 5, type 7, type 8, type I, type III, with normal sclerae, dominant form, recessive perinatal lethal; Osteopathia striata with cranial sclerosis; Osteopetrosis autosomal dominant type 1 and 2, recessive 4, recessive 1, recessive 6; Osteoporosis with pseudoglioma; Oto-palato-digital syndrome, types I and II; Ovarian dysgenesis 1; Ovarioleukodystrophy; Pachyonychia congenita 4 and type 2; Paget disease of bone, familial; Pallister-Hall syndrome; Palmoplantar keratoderma, nonepidermolytic, focal or diffuse; Pancreatic agenesis and congenital heart disease; Papillon-Lef\xc3\xa8vre syndrome; Paragangliomas 3; Paramyotonia congenita of von Eulenburg; Parathyroid carcinoma; Parkinson disease 14, 15, 19 (juvenile-onset), 2, 20 (early-onset), 6, (autosomal recessive early-onset, and 9; Partial albinism; Partial hypoxanthine-guanine phosphoribosyltransferase deficiency; Patterned dystrophy of retinal pigment epithelium; PC-K6a; Pelizaeus-Merzbacher disease; Pendred syndrome; Peripheral demyelinating neuropathy, central dysmyelination; Hirschsprung disease; Permanent neonatal diabetes mellitus; Diabetes mellitus, permanent neonatal, with neurologic features; Neonatal insulin-dependent diabetes mellitus; Maturity-onset diabetes of the young, type 2; Peroxisome biogenesis disorder 14B, 2A, 4A, 5B, 6A, 7A, and 7B; Perrault syndrome 4; Perry syndrome; Persistent hyperinsulinemic hypoglycemia of infancy; familial hyperinsulinism; Phenotypes; Phenylketonuria; Pheochromocytoma; Hereditary Paraganglioma-Pheochromocytoma Syndromes; Paragangliomas 1; Carcinoid tumor of intestine; Cowden syndrome 3; Phosphoglycerate dehydrogenase deficiency; Phosphoglycerate kinase 1 deficiency; Photosensitive trichothiodystrophy; Phytanic acid storage disease; Pick disease; Pierson syndrome; Pigmentary retinal dystrophy; Pigmented nodular adrenocortical disease, primary, 1; Pilomatrixoma; Pitt-Hopkins syndrome; Pituitary dependent hypercortisolism; Pituitary hormone deficiency, combined 1, 2, 3, and 4; Plasminogen activator inhibitor type 1 deficiency; Plasminogen deficiency, type I; Platelet-type bleeding disorder 15 and 8; Poikiloderma, hereditary fibrosing, with tendon contractures, myopathy, and pulmonary fibrosis; Polycystic kidney disease 2, adult type, and infantile type; Polycystic lipomembranous osteodysplasia with sclerosing leukoencephalopathy; Polyglucosan body myopathy 1 with or without immunodeficiency; Polymicrogyria, asymmetric, bilateral frontoparietal; Polyneuropathy, hearing loss, ataxia, retinitis pigmentosa, and cataract; Pontocerebellar hypoplasia type 4; Popliteal pterygium syndrome; Porencephaly 2; Porokeratosis 8, disseminated superficial actinic type; Porphobilinogen synthase deficiency; Porphyria cutanea tarda; Posterior column ataxia with retinitis pigmentosa; Posterior polar cataract type 2; Prader-Willi-like syndrome; Premature ovarian failure 4, 5, 7, and 9; Primary autosomal recessive microcephaly 10, 2, 3, and 5; Primary ciliary dyskinesia 24; Primary dilated cardiomyopathy; Left ventricular noncompaction 6; 4, Left ventricular noncompaction 10; Paroxysmal atrial fibrillation; Primary hyperoxaluria, type I, type, and type III; Primary hypertrophic osteoarthropathy, autosomal recessive 2; Primary hypomagnesemia; Primary open angle glaucoma juvenile onset 1; Primary pulmonary hypertension; Primrose syndrome; Progressive familial heart block type 1B; Progressive familial intrahepatic cholestasis 2 and 3; Progressive intrahepatic cholestasis; Progressive myoclonus epilepsy with ataxia; Progressive pseudorheumatoid dysplasia; Progressive sclerosing poliodystrophy; Prolidase deficiency; Proline dehydrogenase deficiency; Schizophrenia 4; Properdin deficiency, X-linked; Propionic academia; Proprotein convertase 1/3 deficiency; Prostate cancer, hereditary, 2; Protan defect; Proteinuria; Finnish congenital nephrotic syndrome; Proteus syndrome; Breast adenocarcinoma; Pseudoachondroplastic spondyloepiphyseal dysplasia syndrome; Pseudohypoaldosteronism type 1 autosomal dominant and recessive and type 2; Pseudohypoparathyroidism type 1A, Pseudopseudohypoparathyroidism; Pseudoneonatal adrenoleukodystrophy; Pseudoprimary hyperaldosteronism; Pseudoxanthoma elasticum; Generalized arterial calcification of infancy 2; Pseudoxanthoma elasticum-like disorder with multiple coagulation factor deficiency; Psoriasis susceptibility 2; PTEN hamartoma tumor syndrome; Pulmonary arterial hypertension related to hereditary hemorrhagic telangiectasia; Pulmonary Fibrosis And/Or Bone Marrow Failure, Telomere-Related, 1 and 3; Pulmonary hypertension, primary, 1, with hereditary hemorrhagic telangiectasia; Purine-nucleoside phosphorylase deficiency; Pyruvate carboxylase deficiency; Pyruvate dehydrogenase E1-alpha deficiency; Pyruvate kinase deficiency of red cells; Raine syndrome; Rasopathy; Recessive dystrophic epidermolysis bullosa; Nail disorder, nonsyndromic congenital, 8; Reifenstein syndrome; Renal adysplasia; Renal carnitine transport defect; Renal coloboma syndrome; Renal dysplasia; Renal dysplasia, retinal pigmentary dystrophy, cerebellar ataxia and skeletal dysplasia; Renal tubular acidosis, distal, autosomal recessive, with late-onset sensorineural hearing loss, or with hemolytic anemia; Renal tubular acidosis, proximal, with ocular abnormalities and mental retardation; Retinal cone dystrophy 3B; Retinitis pigmentosa; Retinitis pigmentosa 10, 11, 12, 14, 15, 17, and 19; Retinitis pigmentosa 2, 20, 25, 35, 36, 38, 39, 4, 40, 43, 45, 48, 66, 7, 70, 72; Retinoblastoma; Rett disorder; Rhabdoid tumor predisposition syndrome 2; Rhegmatogenous retinal detachment, autosomal dominant; Rhizomelic chondrodysplasia punctata type 2 and type 3; Roberts-SC phocomelia syndrome; Robinow Sorauf syndrome; Robinow syndrome, autosomal recessive, autosomal recessive, with brachy-syn-polydactyly; Rothmund-Thomson syndrome; Rapadilino syndrome; RRM2B-related mitochondrial disease; Rubinstein-Taybi syndrome; Salla disease; Sandhoff disease, adult and infantil types; Sarcoidosis, early-onset; Blau syndrome; Schindler disease, type 1; Schizencephaly; Schizophrenia 15; Schneckenbecken dysplasia; Schwannomatosis 2; Schwartz Jampel syndrome type 1; Sclerocornea, autosomal recessive; Sclerosteosis; Secondary hypothyroidism; Segawa syndrome, autosomal recessive; Senior-Loken syndrome 4 and 5; Sensory ataxic neuropathy, dysarthria, and ophthalmoparesis; Sepiapterin reductase deficiency; SeSAME syndrome; Severe combined immunodeficiency due to ADA deficiency, with microcephaly, growth retardation, and sensitivity to ionizing radiation, atypical, autosomal recessive, T cell-negative, B cell-positive, NK cell-negative of NK-positive; Severe congenital neutropenia; Severe congenital neutropenia 3, autosomal recessive or dominant; Severe congenital neutropenia and 6, autosomal recessive; Severe myoclonic epilepsy in infancy; Generalized epilepsy with febrile seizures plus, types 1 and 2; Severe X-linked myotubular myopathy; Short QT syndrome 3; Short stature with nonspecific skeletal abnormalities; Short stature, auditory canal atresia, mandibular hypoplasia, skeletal abnormalities; Short stature, onychodysplasia, facial dysmorphism, and hypotrichosis; Primordial dwarfism; Short-rib thoracic dysplasia 11 or 3 with or without polydactyly; Sialidosis type I and II; Sickle cell anemia; Silver spastic paraplegia syndrome; Slowed nerve conduction velocity, autosomal dominant; Smith-Lemli-Opitz syndrome; Snyder Robinson syndrome; Somatotroph adenoma; Prolactinoma; familial, Pituitary adenoma predisposition; Sotos syndrome 1 or 2; Spastic ataxia 5, autosomal recessive, Charlevoix-Saguenay type, 1,10, or 11, autosomal recessive; Amyotrophic lateral sclerosis type 5; Spastic paraplegia 15, 2, 3, 35, 39, 4, autosomal dominant, 55, autosomal recessive, and 5A; Bile acid synthesis defect, congenital, 3; Spermatogenic failure 11, 3, and 8; Spherocytosis types 4 and 5; Spheroid body myopathy; Spinal muscular atrophy, lower extremity predominant 2, autosomal dominant; Spinal muscular atrophy, type II; Spinocerebellar ataxia 14, 21, 35, 40, and 6; Spinocerebellar ataxia autosomal recessive 1 and 16; Splenic hypoplasia; Spondylocarpotarsal synostosis syndrome; Spondylocheirodysplasia, Ehlers-Danlos syndrome-like, with immune dysregulation, Aggrecan type, with congenital joint dislocations, short limb-hand type, Sedaghatian type, with cone-rod dystrophy, and Kozlowski type; Parastremmatic dwarfism; Stargardt disease 1; Cone-rod dystrophy 3; Stickler syndrome type 1; Kniest dysplasia; Stickler syndrome, types 1 (nonsyndromic ocular) and 4; Sting-associated vasculopathy, infantile-onset; Stormorken syndrome; Sturge-Weber syndrome, Capillary malformations, congenital, 1; Succinyl-CoA acetoacetate transferase deficiency; Sucrase-isomaltase deficiency; Sudden infant death syndrome; Sulfite oxidase deficiency, isolated; Supravalvar aortic stenosis; Surfactant metabolism dysfunction, pulmonary, 2 and 3; Symphalangism, proximal, lb; Syndactyly Cenani Lenz type; Syndactyly type 3; Syndromic X-linked mental retardation 16; Talipes equinovarus; Tangier disease; TARP syndrome; Tay-Sachs disease, B1 variant, Gm2-gangliosidosis (adult), Gm2-gangliosidosis (adult-onset); Temtamy syndrome; Tenorio Syndrome; Terminal osseous dysplasia; Testosterone 17-beta-dehydrogenase deficiency; Tetraamelia, autosomal recessive; Tetralogy of Fallot; Hypoplastic left heart syndrome 2; Truncus arteriosus; Malformation of the heart and great vessels; Ventricular septal defect 1; Thiel-Behnke corneal dystrophy; Thoracic aortic aneurysms and aortic dissections; Marfanoid habitus; Three M syndrome 2; Thrombocytopenia, platelet dysfunction, hemolysis, and imbalanced globin synthesis; Thrombocytopenia, X-linked; Thrombophilia, hereditary, due to protein C deficiency, autosomal dominant and recessive; Thyroid agenesis; Thyroid cancer, follicular; Thyroid hormone metabolism, abnormal; Thyroid hormone resistance, generalized, autosomal dominant; Thyrotoxic periodic paralysis and Thyrotoxic periodic paralysis 2; Thyrotropin-releasing hormone resistance, generalized; Timothy syndrome; TNF receptor-associated periodic fever syndrome (TRAPS); Tooth agenesis, selective, 3 and 4; Torsades de pointes; Townes-Brocks-branchiootorenal-like syndrome; Transient bullous dermolysis of the newborn; Treacher collins syndrome 1; Trichomegaly with mental retardation, dwarfism and pigmentary degeneration of retina; Trichorhinophalangeal dysplasia type I; Trichorhinophalangeal syndrome type 3; Trimethylaminuria; Tuberous sclerosis syndrome; Lymphangiomyomatosis; Tuberous sclerosis 1 and 2; Tyrosinase-negative oculocutaneous albinism; Tyrosinase-positive oculocutaneous albinism; Tyrosinemia type I; UDPglucose-4-epimerase deficiency; Ullrich congenital muscular dystrophy; Ulna and fibula absence of with severe limb deficiency; Upshaw-Schulman syndrome; Urocanate hydratase deficiency; Usher syndrome, types 1, 1B, 1D, 1G, 2A, 2C, and 2D; Retinitis pigmentosa 39; UV-sensitive syndrome; Van der Woude syndrome; Van Maldergem syndrome 2; Hennekam lymphangiectasia-lymphedema syndrome 2; Variegate porphyria; Ventriculomegaly with cystic kidney disease; Verheij syndrome; Very long chain acyl-CoA dehydrogenase deficiency; Vesicoureteral reflux 8; Visceral heterotaxy 5, autosomal; Visceral myopathy; Vitamin D-dependent rickets, types land 2; Vitelliform dystrophy; von Willebrand disease type 2M and type 3; Waardenburg syndrome type 1, 4C, and 2E (with neurologic involvement); Klein-Waardenberg syndrome; Walker-Warburg congenital muscular dystrophy; Warburg micro syndrome 2 and 4; Warts, hypogammaglobulinemia, infections, and myelokathexis; Weaver syndrome; Weill-Marchesani syndrome 1 and 3; Weill-Marchesani-like syndrome; Weis senbacher-Zweymuller syndrome; Werdnig-Hoffmann disease; Charcot-Marie-Tooth disease; Werner syndrome; WFS1-Related Disorders; Wiedemann-Steiner syndrome; Wilson disease; Wolfram-like syndrome, autosomal dominant; Worth disease; Van Buchem disease type 2; Xeroderma pigmentosum, complementation group b, group D, group E, and group G; X-linked agammaglobulinemia; X-linked hereditary motor and sensory neuropathy; X-linked ichthyosis with steryl-sulfatase deficiency; X-linked periventricular heterotopia; Oto-palato-digital syndrome, type I; X-linked severe combined immunodeficiency; Zimmermann-Laband syndrome and Zimmermann-Laband syndrome 2; and Zonular pulverulent cataract 3.

[0353] In some aspects, the present disclosure provides uses of any one of the fusion proteins described herein and a guide RNA targeting this fusion protein to a target A:T base pair in a nucleic acid molecule in the manufacture of a kit for nucleic acid editing, wherein the nucleic acid editing comprises contacting the nucleic acid molecule with the fusion protein and guide RNA under conditions suitable for the substitution of the adenine (A) of the A:T nucleobase pair with a thymine (T). In some embodiments of these uses, the nucleic acid molecule is a double-stranded DNA molecule. In some embodiments, the step of contacting of induces separation of the double-stranded DNA at a target region. In some embodiments, the step of contacting further comprises nicking one strand of the double-stranded DNA, wherein the one strand comprises an unmutated strand that comprises the T of the target A:T nucleobase pair.

[0354] In some embodiments of the described uses, the step of contacting is performed in vitro. In other embodiments, the step of contacting is performed in vivo. In some embodiments, the step of contacting is performed in a subject (e.g., a human subject or a non-human animal subject). In some embodiments, the step of contacting is performed in a cell, such as a human or non-human animal cell.

[0355] The present disclosure also provides uses of any one of the fusion proteins described herein as a medicament. The present disclosure also provides uses of any one of the complexes of fusion proteins and guide RNAs described herein as a medicament.

### Pharmaceutical Compositions

[0356] Other embodiments of the present disclosure relate to pharmaceutical compositions comprising any of the fusion proteins or the fusion protein-gRNA complexes described herein. The term “pharmaceutical composition”, as used herein, refers to a composition formulated for pharmaceutical use. In some embodiments, the pharmaceutical composition further comprises a pharmaceutically acceptable carrier. In some embodiments, the pharmaceutical composition comprises additional agents (e.g. for specific delivery, increasing half-life, or other therapeutic compounds).

[0357] In some embodiments, any of the fusion proteins, gRNAs, and/or complexes described herein are provided as part of a pharmaceutical composition. In some embodiments, the pharmaceutical composition comprises any of the fusion proteins provided herein. In some embodiments, the pharmaceutical composition comprises any of the complexes provided herein. In some embodiments pharmaceutical composition comprises a gRNA, a napDNAbp-dCas9 fusion protein, and a pharmaceutically acceptable excipient. In some embodiments pharmaceutical composition comprises a gRNA, a napDNAbp-nCas9 fusion protein, and a pharmaceutically acceptable excipient. Pharmaceutical compositions may optionally comprise one or more additional therapeutically active substances.

[0358] In some embodiments, compositions provided herein are administered to a subject, for example, to a human subject, in order to effect a targeted genomic modification within the subject. In some embodiments, cells are obtained from the subject and contacted with a any of the pharmaceutical compositions provided herein. In some embodiments, cells removed from a subject and contacted ex vivo with a pharmaceutical composition are re-introduced into the subject, optionally after the desired genomic modification has been effected or detected in the cells. Methods of delivering pharmaceutical compositions comprising nucleases are known, and are described, for example, in U.S. Pat. Nos. 6,453,242; 6,503,717; 6,534,261; 6,599,692; 6,607,882; 6,689,558; 6,824,978; 6,933,113; 6,979,539; 7,013,219; and 7,163,824, the disclosures of all of which are incorporated by reference herein in their entireties. Although the descriptions of pharmaceutical compositions provided herein are principally directed to pharmaceutical compositions which are suitable for administration to humans, it will be understood by the skilled artisan that such compositions are generally suitable for administration to animals or organisms of all sorts. Modification of pharmaceutical compositions suitable for administration to humans in order to render the compositions suitable for administration to various animals is well understood, and the ordinarily skilled veterinary pharmacologist can design and/or perform such modification with merely ordinary, if any, experimentation. Subjects to which administration of the pharmaceutical compositions is contemplated include, but are not limited to, humans and/or other primates; mammals, domesticated animals, pets, and commercially relevant mammals such as cattle, pigs, horses, sheep, cats, dogs, mice, and/or rats; and/or birds, including commercially relevant birds such as chickens, ducks, geese, and/or turkeys.

[0359] Formulations of the pharmaceutical compositions described herein may be prepared by any method known or hereafter developed in the art of pharmacology. In general, such preparatory methods include the step of bringing the active ingredient(s) into association with an excipient and/or one or more other accessory ingredients, and then, if necessary and/or desirable, shaping and/or packaging the product into a desired single- or multi-dose unit.

[0360] Pharmaceutical formulations may additionally comprise a pharmaceutically acceptable excipient, which, as used herein, includes any and all solvents, dispersion media, diluents, or other liquid vehicles, dispersion or suspension aids, surface active agents, isotonic agents, thickening or emulsifying agents, preservatives, solid binders, lubricants and the like, as suited to the particular dosage form desired. Remington's The Science and Practice of Pharmacy, 21^{st} Edition, A. R. Gennaro (Lippincott, Williams & Wilkins, Baltimore, Md., 2006; incorporated in its entirety herein by reference) discloses various excipients used in formulating pharmaceutical compositions and known techniques for the preparation thereof. See also PCT application PCT/US2010/055131 (Publication No. WO/2011053982), filed Nov. 2, 2010, incorporated in its entirety herein by reference, for additional suitable methods, reagents, excipients and solvents for producing pharmaceutical compositions comprising a nuclease. Except insofar as any conventional excipient medium is incompatible with a substance or its derivatives, such as by producing any undesirable biological effect or otherwise interacting in a deleterious manner with any other component(s) of the pharmaceutical composition, its use is contemplated to be within the scope of this disclosure.

[0361] As used here, the term “pharmaceutically acceptable carrier” means a pharmaceutically acceptable material, composition or vehicle, such as a liquid or solid filler, diluent, excipient, manufacturing aid (e.g., lubricant, talc magnesium, calcium or zinc stearate, or steric acid), or solvent encapsulating material, involved in carrying or transporting the compound from one site (e.g., the delivery site) of the body, to another site (e.g., organ, tissue or portion of the body). A pharmaceutically acceptable carrier is “acceptable” in the sense of being compatible with the other ingredients of the formulation and not injurious to the tissue of the subject (e.g., physiologically compatible, sterile, physiologic pH, etc.). Some examples of materials which can serve as pharmaceutically acceptable carriers include: (1) sugars, such as lactose, glucose and sucrose; (2) starches, such as corn starch and potato starch; (3) cellulose, and its derivatives, such as sodium carboxymethyl cellulose, methylcellulose, ethyl cellulose, microcrystalline cellulose and cellulose acetate; (4) powdered tragacanth; (5) malt; (6) gelatin; (7) lubricating agents, such as magnesium stearate, sodium lauryl sulfate and talc; (8) excipients, such as cocoa butter and suppository waxes; (9) oils, such as peanut oil, cottonseed oil, safflower oil, sesame oil, olive oil, corn oil and soybean oil; (10) glycols, such as propylene glycol; (11) polyols, such as glycerin, sorbitol, mannitol and polyethylene glycol (PEG); (12) esters, such as ethyl oleate and ethyl laurate; (13) agar; (14) buffering agents, such as magnesium hydroxide and aluminum hydroxide; (15) alginic acid; (16) pyrogen-free water; (17) isotonic saline; (18) Ringer's solution; (19) ethyl alcohol; (20) pH buffered solutions; (21) polyesters, polycarbonates and/or polyanhydrides; (22) bulking agents, such as polypeptides and amino acids (23) serum component, such as serum albumin, HDL and LDL; (22) C2-C12 alcohols, such as ethanol; and (23) other non-toxic compatible substances employed in pharmaceutical formulations. Wetting agents, coloring agents, release agents, coating agents, sweetening agents, flavoring agents, perfuming agents, preservative and antioxidants may also be present in the formulation. The terms such as “excipient”, “carrier”, “pharmaceutically acceptable carrier” or the like are used interchangeably herein.

[0362] In some embodiments, the pharmaceutical composition is formulated for delivery to a subject, e.g., for gene editing. Suitable routes of administrating the pharmaceutical composition described herein include, without limitation: topical, subcutaneous, transdermal, intradermal, intralesional, intraarticular, intraperitoneal, intravesical, transmucosal, gingival, intradental, intracochlear, transtympanic, intraorgan, epidural, intrathecal, intramuscular, intravenous, intravascular, intraosseus, periocular, intratumoral, intracerebral, and intracerebroventricular administration.

[0363] In some embodiments, the pharmaceutical composition described herein is administered locally to a diseased site. In some embodiments, the pharmaceutical composition described herein is administered to a subject by injection, by means of a catheter, by means of a suppository, or by means of an implant, the implant being of a porous, non-porous, or gelatinous material, including a membrane, such as a sialastic membrane, or a fiber.

[0364] In some embodiments, the pharmaceutical composition is formulated in accordance with routine procedures as a composition adapted for intravenous or subcutaneous administration to a subject, e.g., a human. In some embodiments, pharmaceutical composition for administration by injection are solutions in sterile isotonic aqueous buffer. Where necessary, the pharmaceutical can also include a solubilizing agent and a local anesthetic such as lignocaine to ease pain at the site of the injection. Generally, the ingredients are supplied either separately or mixed together in unit dosage form, for example, as a dry lyophilized powder or water free concentrate in a hermetically sealed container such as an ampoule or sachette indicating the quantity of active agent. Where the pharmaceutical is to be administered by infusion, it can be dispensed with an infusion bottle containing sterile pharmaceutical grade water or saline. Where the pharmaceutical composition is administered by injection, an ampoule of sterile water for injection or saline can be provided so that the ingredients can be mixed prior to administration.

[0365] The pharmaceutical composition can be contained within a lipid particle or vesicle, such as a liposome or microcrystal, which is also suitable for parenteral administration. The particles can be of any suitable structure, such as unilamellar or plurilamellar, so long as compositions are contained therein. Compounds can be entrapped in “stabilized plasmid-lipid particles” (SPLP) containing the fusogenic lipid dioleoylphosphatidylethanolamine (DOPE), low levels (5-10 mol %) of cationic lipid, and stabilized by a polyethyleneglycol (PEG) coating (Zhang Y. P. et al., Gene Ther. 1999, 6:1438-47). Positively charged lipids such as N-[1-(2,3-dioleoyloxi)propyl]-N,N,N-trimethyl-amoniummethylsulfate, or “DOTAP,” are particularly preferred for such particles and vesicles. The preparation of such lipid particles is well known. See, e.g., U.S. Pat. Nos. 4,880,635; 4,906,477; 4,911,928; 4,917,951; 4,920,016; and 4,921,757; each of which is incorporated herein by reference.

[0366] The pharmaceutical composition described herein may be administered or packaged as a unit dose, for example. The term “unit dose” when used in reference to a pharmaceutical composition of the present disclosure refers to physically discrete units suitable as unitary dosage for the subject, each unit containing a predetermined quantity of active material calculated to produce the desired therapeutic effect in association with the required diluent; i.e., carrier, or vehicle.

[0367] Further, the pharmaceutical composition may be provided as a pharmaceutical kit comprising (a) a container containing a compound of the disclosure in lyophilized form and (b) a second container containing a pharmaceutically acceptable diluent (e.g., sterile water) for injection. The pharmaceutically acceptable diluent can be used for reconstitution or dilution of the lyophilized compound of the disclosure. Optionally associated with such container(s) can be a notice in the form prescribed by a governmental agency regulating the manufacture, use or sale of pharmaceuticals or biological products, which notice reflects approval by the agency of manufacture, use or sale for human administration.

[0368] In another aspect, an article of manufacture containing materials useful for the treatment of the diseases described above is included. In some embodiments, the article of manufacture comprises a container and a label. Suitable containers include, for example, bottles, vials, syringes, and test tubes. The containers may be formed from a variety of materials such as glass or plastic. In some embodiments, the container holds a composition that is effective for treating a disease described herein and may have a sterile access port. For example, the container may be an intravenous solution bag or a vial having a stopper pierceable by a hypodermic injection needle. The active agent in the composition is a compound of the disclosure. In some embodiments, the label on or associated with the container indicates that the composition is used for treating the disease of choice. The article of manufacture may further comprise a second container comprising a pharmaceutically acceptable buffer, such as phosphate-buffered saline, Ringer's solution, or dextrose solution. It may further include other materials desirable from a commercial and user standpoint, including other buffers, diluents, filters, needles, syringes, and package inserts with instructions for use.

### Delivery Methods

[0369] In some embodiments, the disclosure provides methods comprising delivering any of the fusion proteins, gRNAs, and/or complexes described herein. In other embodiments, the disclosure provides methods comprising delivery of one or more vectors as described herein, one or more transcripts thereof, and/or one or proteins transcribed therefrom, to a host cell. In some embodiments, the disclosure further provides cells produced by such methods, and organisms (such as animals, plants, or fungi) comprising or produced from such cells. In some embodiments, a base editor as described herein in combination with (and optionally complexed with) a guide sequence is delivered to a cell.

[0370] Conventional viral and non-viral based gene transfer methods may be used to introduce nucleic acids in mammalian cells or target tissues. Such methods may be used to administer nucleic acids encoding components of a base editor to cells in culture, or in a host organism. Non-viral vector delivery systems include ribonucleoprotein (RNP) complexes, DNA plasmids, RNA (e.g. a transcript of a vector described herein), naked nucleic acid, and nucleic acid complexed with a delivery vehicle, such as a liposome. Viral vector delivery systems include DNA and RNA viruses, which have either episomal or integrated genomes after delivery to the cell. For a review of gene therapy procedures, see Anderson, Science 256:808-813 (1992); Nabel & Felgner, TIBTECH 11:211-217 (1993); Mitani & Caskey, TIBTECH 11:162-166 (1993); Dillon, TIBTECH 11:167-175 (1993); Miller, Nature 357:455-460 (1992); Van Brunt, Biotechnology 6(10):1149-1154 (1988); Vigne, Restorative Neurology and Neuroscience 8:35-36 (1995); Kremer & Perricaudet, British Medical Bulletin 51(1):31-44 (1995); Haddada et al., in Current Topics in Microbiology and Immunology Doerfler and Bihm (eds) (1995); and Yu et al., Gene Therapy 1:13-26 (1994).

[0371] In certain embodiments, the method of delivery and vector provided herein is an RNP complex. RNP delivery of base editors markedly increases the DNA specificity of base editing. RNP delivery of base editors leads to decoupling of on- and off-target editing. RNP delivery ablated off-target editing at non-repetitive sites while maintaining on-target editing comparable to plasmid delivery, and greatly reduced off-target editing even at the highly repetitive VEGFA site 2. See Rees, H. A. et al., Improving the DNA specificity and applicability of base editing through protein engineering and protein delivery, Nat. Commun. 8, 15790 (2017), which is incorporated by reference herein in its entirety.

[0372] Methods of non-viral delivery of nucleic acids include RNP complexes, lipofection, nucleofection, microinjection, biolistics, virosomes, liposomes, immunoliposomes, polycation or lipid:nucleic acid conjugates, naked DNA, artificial virions, and agent-enhanced uptake of DNA. Lipofection is described in e.g., U.S. Pat. Nos. 5,049,386, 4,946,787; and 4,897,355) and lipofection reagents are sold commercially (e.g., Transfectam™ and Lipofectin™). Cationic and neutral lipids that are suitable for efficient receptor-recognition lipofection of polynucleotides include those of Feigner, WO 1991/17424; WO 1991/16024. Delivery can be to cells (e.g. in vitro or ex vivo administration) or target tissues (e.g. in vivo administration).

[0373] The preparation of lipid:nucleic acid complexes, including targeted liposomes such as immunolipid complexes, is well known to one of skill in the art (see, e.g., Crystal, Science 270:404-410 (1995); Blaese et al., Cancer Gene Ther. 2:291-297 (1995); Behr et al., Bioconjugate Chem. 5:382-389 (1994); Remy et al., Bioconjugate Chem. 5:647-654 (1994); Gao et al., Gene Therapy 2:710-722 (1995); Ahmad et al., Cancer Res. 52:4817-4820 (1992); U.S. Pat. Nos. 4,186,183, 4,217,344, 4,235,871, 4,261,975, 4,485,054, 4,501,728, 4,774,085, 4,837,028, and 4,946,787).

[0374] The use of RNA or DNA viral based systems for the delivery of nucleic acids take advantage of highly evolved processes for targeting a virus to specific cells in the body and trafficking the viral payload to the nucleus. Viral vectors may be administered directly to patients (in vivo) or they may be used to treat cells in vitro, and the modified cells may optionally be administered to patients (ex vivo). Conventional viral based systems could include retroviral, lentivirus, adenoviral, adeno-associated and herpes simplex virus vectors for gene transfer. Integration in the host genome is possible with the retrovirus, lentivirus, and adeno-associated virus gene transfer methods, often resulting in long term expression of the inserted transgene. Additionally, high transduction efficiencies have been observed in many different cell types and target tissues.

[0375] The tropism of a viruses can be altered by incorporating foreign envelope proteins, expanding the potential target population of target cells. Lentiviral vectors are retroviral vectors that are able to transduce or infect non-dividing cells and typically produce high viral titers. Selection of a retroviral gene transfer system would therefore depend on the target tissue. Retroviral vectors are comprised of cis-acting long terminal repeats with packaging capacity for up to 6-10 kb of foreign sequence. The minimum cis-acting LTRs are sufficient for replication and packaging of the vectors, which are then used to integrate the therapeutic gene into the target cell to provide permanent transgene expression. Widely used retroviral vectors include those based upon murine leukemia virus (MuLV), gibbon ape leukemia virus (GaLV), Simian Immuno deficiency virus (SIV), human immuno deficiency virus (HIV), and combinations thereof (see, e.g., Buchscher et al., J. Virol. 66:2731-2739 (1992); Johann et al., J. Virol. 66:1635-1640 (1992); Sommnerfelt et al., Virol. 176:58-59 (1990); Wilson et al., J. Virol. 63:2374-2378 (1989); Miller et al., J. Virol. 65:2220-2224 (1991); PCT/US94/05700). In applications where transient expression is preferred, adenoviral based systems may be used. Adenoviral based vectors are capable of very high transduction efficiency in many cell types and do not require cell division. With such vectors, high titer and levels of expression have been obtained. This vector can be produced in large quantities in a relatively simple system. Adeno-associated virus (“AAV”) vectors may also be used to transduce cells with target nucleic acids, e.g., in the in vitro production of nucleic acids and peptides, and for in vivo and ex vivo gene therapy procedures (see, e.g., West et al., Virology 160:38-47 (1987); U.S. Pat. No. 4,797,368; WO 93/24641; Kotin, Human Gene Therapy 5:793-801 (1994); Muzyczka, J. Clin. Invest. 94:1351 (1994). Construction of recombinant AAV vectors are described in a number of publications, including U.S. Pat. No. 5,173,414; Tratschin et al., Mol. Cell. Biol. 5:3251-3260 (1985); Tratschin, et al., Mol. Cell. Biol. 4:2072-2081 (1984); Hermonat & Muzyczka, PNAS 81:6466-6470 (1984); and Samulski et al., J. Virol. 63:03822-3828 (1989).

[0376] Packaging cells are typically used to form virus particles that are capable of infecting a host cell. Such cells include 293 cells, which package adenovirus, and w2 cells or PA317 cells, which package retrovirus. Viral vectors used in gene therapy are usually generated by producing a cell line that packages a nucleic acid vector into a viral particle. The vectors typically contain the minimal viral sequences required for packaging and subsequent integration into a host, other viral sequences being replaced by an expression cassette for the polynucleotide(s) to be expressed. The missing viral functions are typically supplied in trans by the packaging cell line. For example, AAV vectors used in gene therapy typically only possess ITR sequences from the AAV genome which are required for packaging and integration into the host genome. Viral DNA is packaged in a cell line, which contains a helper plasmid encoding the other AAV genes, namely rep and cap, but lacking ITR sequences. The cell line may also be infected with adenovirus as a helper. The helper virus promotes replication of the AAV vector and expression of AAV genes from the helper plasmid. The helper plasmid is not packaged in significant amounts due to a lack of ITR sequences. Contamination with adenovirus can be reduced by, e.g., heat treatment to which adenovirus is more sensitive than AAV. Additional methods for the delivery of nucleic acids to cells are known to those skilled in the art. Reference is made to US 2003/0087817, published May 8, 2003, International Patent Application No. WO 2016/205764, published Dec. 22, 2016, International Patent Application No. WO 2018/071868, published Apr. 19, 2018, and U.S. Patent Publication No. 2018/0127780, published May 10, 2018, the disclosures of each of which are incorporated herein by reference.

[0377] In various embodiments, the disclosed expression constructs may be engineered for delivery in one or more rAAV vectors. An rAAV as related to any of the methods and compositions provided herein may be of any serotype including any derivative or pseudotype (e.g., 1, 2, 3, 4, 5, 6, 7, 8, 9, 10, 11, 12, 13, 2/1, 2/5, 2/8, 2/9, 3/1, 3/5, 3/8, or 3/9). An rAAV may comprise a genetic load (i.e., a recombinant nucleic acid vector that expresses a gene of interest, such as a whole or split fusion protein that is carried by the rAAV into a cell) that is to be delivered to a cell. An rAAV may be chimeric.

[0378] As used herein, the serotype of an rAAV refers to the serotype of the capsid proteins of the recombinant virus. Non-limiting examples of derivatives and pseudotypes include rAAV2/1, rAAV2/5, rAAV2/8, rAAV2/9, AAV2-AAV3 hybrid, AAVrh.10, AAVhu.14, AAV3a/3b, AAVrh32.33, AAV-HSC15, AAV-HSC17, AAVhu.37, AAVrh.8, CHt-P6, AAV2.5, AAV6.2, AAV2i8, AAV-HSC15/17, AAVM41, AAV9.45, AAV6(Y445F/Y731F), AAV2.5T, AAV-HAE1/2, AAV clone 32/83, AAVShH10, AAV2 (Y->F), AAV8 (Y733F), AAV2.15, AAV2.4, AAVM41, and AAVr3.45. A non-limiting example of derivatives and pseudotypes that have chimeric VP1 proteins is rAAV2/5-1VP1u, which has the genome of AAV2, capsid backbone of AAV5 and VP1u of AAV1. Other non-limiting example of derivatives and pseudotypes that have chimeric VP1 proteins are rAAV2/5-8VP1u, rAAV2/9-1VP1u, and rAAV2/9-8VP1u.

[0379] AAV derivatives/pseudotypes, and methods of producing such derivatives/pseudotypes are known in the art (see, e.g., Mol Ther. 2012 April; 20(4):699-708. doi: 10.1038/mt.2011.287. Epub 2012 Jan. 24. The AAV vector toolkit: poised at the clinical crossroads. Asokan Al, Schaffer D V, Samulski R J.). Methods for producing and using pseudotyped rAAV vectors are known in the art (see, e.g., Duan et al., J. Virol., 75:7662-7671, 2001; Halbert et al., J. Virol., 74:1524-1532, 2000; Zolotukhin et al., Methods, 28:158-167, 2002; and Auricchio et al., Hum. Molec. Genet., 10:3075-3081, 2001).

[0380] Methods of making or packaging rAAV particles are known in the art and reagents are commercially available (see, e.g., Zolotukhin et al. Production and purification of serotype 1, 2, and 5 recombinant adeno-associated viral vectors. Methods 28 (2002) 158-167; and U.S. Patent Publication Numbers US20070015238 and US20120322861, which are incorporated herein by reference; and plasmids and kits available from ATCC and Cell Biolabs, Inc.). For example, a plasmid comprising a gene of interest may be combined with one or more helper plasmids, e.g., that contain a rep gene (e.g., encoding Rep78, Rep68, Rep52 and Rep40) and a cap gene (encoding VP1, VP2, and VP3, including a modified VP2 region as described herein), and transfected into a recombinant cells such that the rAAV particle can be packaged and subsequently purified.

[0381] In some embodiments, the fusion proteins can be divided at a split site and provided as two halves of a whole/complete fusion protein. The two halves can be delivered to cells (e.g., as expressed proteins or on separate expression vectors) and once in contact inside the cell, the two halves form the complete fusion protein through the self-splicing action of the inteins on each fusion protein half. Split intein sequences can be engineered into each of the halves of the encoded fusion protein to facilitate their transplicing inside the cell and the concomitant restoration of the complete, functioning ATBE.

[0382] These split intein-based methods overcome several barriers to in vivo delivery. For example, the DNA encoding fusion proteins is larger than the recombinant AAV (rAAV) packaging limit, and so requires different solutions. One such solution is formulating the editor fused to split intein pairs that are packaged into two separate rAAV particles that, when co-delivered to a cell, reconstitute the functional editor protein. Several other special considerations to account for the unique features of base editing are described, including the optimization of second-site nicking targets and properly packaging fusion proteins into virus vectors, including lentiviruses and rAAV.

[0383] Accordingly, the disclosure provides dual rAAV vectors and dual rAAV vector particles that comprise expression constructs that encode two halves of any of the disclosed fusion proteins, wherein the encoded fusion protein is divided between the two halves at a split site. In some embodiments, the two halves may be delivered to cells (e.g., as expressed proteins or on separate expression vectors) and once in contact inside the cell, the two halves form the complete fusion protein through the self-splicing action of the inteins on each fusion protein half. Split intein sequences can be engineered into each of the halves of the encoded fusion protein to facilitate their transplicing inside the cell and the concomitant restoration of the complete, functioning ATBE.

[0384] In various embodiments, the fusion proteins may be engineered as two half proteins (i.e., an ATBE N-terminal half and a ATBE C-terminal half) by “splitting” the whole fusion protein as a “split site.” The “split site” refers to the location of insertion of split intein sequences (i.e., the N intein and the C intein) between two adjacent amino acid residues in the fusion protein. More specifically, the “split site” refers to the location of dividing the whole fusion protein into two separate halves, wherein in each halve is fused at the split site to either the N intein or the C intein motifs. The split site can be at any suitable location in the fusion protein fusion protein, but preferably the split site is located at a position that allows for the formation of two half proteins which are appropriately sized for delivery (e.g., by expression vector) and wherein the inteins, which are fused to each half protein at the split site termini, are available to sufficiently interact with one another when one half protein contacts the other half protein inside the cell.

[0385] Additional methods for the delivery of nucleic acids to cells are known to those skilled in the art. See, for example, US 2003/0087817, incorporated herein by reference.

[0386] It should be appreciated that any fusion protein, e.g., any of the fusion proteins provided herein, may be introduced into the cell in any suitable way, either stably or transiently. In some embodiments, a fusion protein may be transfected into the cell. In some embodiments, the cell may be transduced or transfected with a nucleic acid construct that encodes a fusion protein. For example, a cell may be transduced (e.g., with a virus encoding a fusion protein), or transfected (e.g., with a plasmid encoding a fusion protein) with a nucleic acid that encodes a fusion protein, or the translated fusion protein. Such transduction may be a stable or transient transduction. In some embodiments, cells expressing a fusion protein or containing a fusion protein may be transduced or transfected with one or more gRNA molecules, for example when the fusion protein comprises a Cas9 (e.g., nCas9) domain. In some embodiments, a plasmid expressing a fusion protein may be introduced into cells through electroporation, transient (e.g., lipofection) and stable genome integration (e.g., piggybac) and viral transduction or other methods known to those of skill in the art.

### Kits and Cells

[0387] This disclosure provides kits comprising a nucleic acid construct comprising nucleotide sequences encoding the fusion proteins, gRNAs, and/or complexes described herein. Some embodiments of this disclosure provide kits comprising a nucleic acid construct comprising a nucleotide sequence encoding an adenosine methyltransferase-napDNAbp fusion protein capable of methylating an adenosine in a nucleic acid molecule. In some embodiments, the nucleotide sequence encodes any of the adenosine methyltransferases provided herein. In some embodiments, the nucleotide sequence comprises a heterologous promoter that drives expression of the adenosine methyltransferase. The nucleotide sequence may further comprise a heterologous promoter that drives expression of the gRNA, or a heterologous promoter that drives expression of the fusion protein and the gRNA.

[0388] In some embodiments, the kit further comprises an expression construct encoding a guide nucleic acid backbone, e.g., a guide RNA backbone, wherein the construct comprises a cloning site positioned to allow the cloning of a nucleic acid sequence identical or complementary to a target sequence into the guide nucleic acid, e.g., guide RNA backbone.

[0389] Some embodiments of this disclosure provide kits comprising a nucleic acid construct, comprising (a) a nucleotide sequence encoding a napDNAbp (e.g., a Cas9 domain) fused to an adenosine methyltransferase, or a fusion protein comprising a napDNAbp (e.g., Cas9 domain) and an adenosine methyltransferase as provided herein; and (b) a heterologous promoter that drives expression of the sequence of (a). In some embodiments, the kit further comprises an expression construct encoding a guide nucleic acid backbone, e.g., a guide RNA backbone, wherein the construct comprises a cloning site positioned to allow the cloning of a nucleic acid sequence identical or complementary to a target sequence into the guide nucleic acid, e.g., guide RNA backbone. In some embodiments, the kit further comprises an expression construct comprising a nucleotide sequence encoding an iDAR.

[0390] The disclosure further provides kits comprising a fusion protein as provided herein, a gRNA having complementarity to a target sequence, and one or more of the following: cofactor proteins, buffers, media, and target cells (e.g. human cells). Kits may comprise combinations of several or all of the aforementioned components.

[0391] Some embodiments of this disclosure provide cells comprising any of the fusion proteins or complexes provided herein. In some embodiments, the cells comprise nucleotide constructs that encodes any of the fusion proteins provided herein. In some embodiments, the cells comprise any of the nucleotides or vectors provided herein. In some embodiments, a host cell is transiently or non-transiently transfected with one or more vectors described herein. In some embodiments, a cell is transfected as it naturally occurs in a subject. In some embodiments, a cell that is transfected is taken from a subject. In some embodiments, the cell is derived from cells taken from a subject, such as a cell line. A wide variety of cell lines for tissue culture are known in the art.

[0392] In some embodiments, a host cell is transiently or non-transiently transfected with one or more vectors described herein. In some embodiments, a cell is transfected as it naturally occurs in a subject. In some embodiments, a cell that is transfected is taken from a subject. In some embodiments, the cell is derived from cells taken from a subject, such as a cell line. A wide variety of cell lines for tissue culture are known in the art. Examples of cell lines include, but are not limited to, C8161, CCRF-CEM, MOLT, mIMCD-3, NHDF, HeLa-S3, Huh1, Huh4, Huh7, HUVEC, HASMC, HEKn, HEKa, MiaPaCell, Panc1, PC-3, TF1, CTLL-2, C1R, Rat6, CV1, RPTE, A10, T24, J82, A375, ARH-77, Calu1, SW480, SW620, SKOV3, SK-UT, CaCo2, P388D1, SEM-K2, WEHI-231, HB56, TIB55, Jurkat, J45.01, LRMB, Bcl-1, BC-3, IC21, DLD2, Raw264.7, NRK, NRK-52E, MRCS, MEF, Hep G2, HeLa B, HeLa T4, COS, COS-1, COS-6, COS-M6A, BS-C-1 monkey kidney epithelial, BALB/3T3 mouse embryo fibroblast, 3T3 Swiss, 3T3-L1, 132-d5 human fetal fibroblasts; 10.1 mouse fibroblasts, 293-T, 3T3, 721, 9L, A2780, A2780ADR, A2780cis, A 172, A20, A253, A431, A-549, ALC, B16, B35, BCP-1 cells, BEAS-2B, bEnd.3, BHK-21, BR 293. BxPC3. C3H-10T1/2, C6/36, Cal-27, CHO, CHO-7, CHO-IR, CHO-K1, CHO-K2, CHO-T, CHO Dhfr−/−, COR-L23, COR-L23/CPR, COR-L23/5010, COR-L23/R23, COS-7, COV-434, CML T1, CMT, CT26, D17, DH82, DU145, DuCaP, EL4, EM2, EM3, EMT6/AR1, EMT6/AR10.0, FM3, H1299, H69, HB54, HB55, HCA2, HEK-293, HeLa, Hepalc1c7, HL-60, HMEC, HT-29, Jurkat, JY cells, K562 cells, Ku812, KCL22, KG1, KYO1, LNCap, Ma-Mel 1-48, MC-38, MCF-7, MCF-10A, MDA-MB-231, MDA-MB-468, MDA-MB-435, MDCK II, MDCK 11, MOR/0.2R, MONO-MAC 6, MTD-1A, MyEnd, NCI-H69/CPR, NCI-H69/LX10, NCI-H69/LX20, NCI-H69/LX4, NIH-3T3, NALM-1, NW-145, OPCN/OPCT cell lines, Peer, PNT-1A/PNT 2, RenCa, RIN-5F, RMA/RMAS, Saos-2 cells, Sf-9, SkBr3, T2, T-47D, T84, THP1 cell line, U373, U87, U937, VCaP, Vero cells, WM39, WT-49, X63, YAC-1, YAR, and transgenic varieties thereof. Cell lines are available from a variety of sources known to those with skill in the art (see, e.g., the American Type Culture Collection (ATCC) (Manassas, Va.)). In some embodiments, a cell transfected with one or more vectors described herein is used to establish a new cell line comprising one or more vector-derived sequences. In some embodiments, a cell transiently transfected with the components of a CRISPR system as described herein (such as by transient transfection of one or more vectors, or transfection with RNA), and modified through the activity of a CRISPR complex, is used to establish a new cell line comprising cells containing the modification but lacking any other exogenous sequence. In some embodiments, cells transiently or non-transiently transfected with one or more vectors described herein, or cell lines derived from such cells are used in assessing one or more test compounds.

### EXAMPLES

### Example 1. A TRM6/61A Base Editor

[0393] Methylation of a targeted adenosine to N1-methyladenosine, which disrupts existing hydrogen bonding with the thymine of the unmutated strand, may be catalyzed by a fusion protein. Without wishing to be bound by any particular theory, during replication or repair of the unmutated strand, the N1-methyladenosine interpreted by a polymerase as a thymine, and the cell's mismatch repair machinery converts the base-paired thymine of the non-edited strand to an adenine to correct the apparent mismatch. Upon the next round of replication, the cell's mismatch repair machinery converts the N1-methyladenosine to a thymine. E. coli TRM6/61A has been reported to methylate adenosine at the N1 position within tRNA. See Zhang C. & Jia, G., Reversible RNA Modification N1-methyladenosine (m¹A) in mRNA and tRNA, Genomics Proteomics Bioinformatics 16:155-161 (2018).

[0394] E. coli TRM6/61A was purified and isolated. The TRM6/61A was tethered to a dCas9 using a SGGSSGGSSGSETPGTSESATPESSGGSSGGS (SEQ ID NO: 5) linker. The fusion protein was introduced to E. coli cells. The TRM6/61A protein was sequenced by LC-MS/MS. The TRM6/61A gene was cloned and the activity of the encoded protein confirmed.

### Example 2. Evolving the TRM6/61A Base Editor

[0395] Following protein purification and sequencing, variants of TRM6/61A are evolved using PACE systems to form a large library of TRM6/61A mutants. Mutants are cloned into a vector coding for an N-terminal fusion with a dCas9. Mutants are then subjected to selection based on ability to convert adenosine into N1-methyladenosine in DNA using an exemplary antibiotic resistance selection, such as a spectinomycin selection system.

[0396] For example, the E. coli selection strain is transformed with a) an accessory plasmid containing an TRM6/61A mutant-dCas9 fusion and targeting guide RNAs, and b) a selection plasmid containing an inactivated spectinomycin resistance gene with a mutation at the active site (D182V) that requires T:A to A:T editing to correct (FIG. 2). Cells harboring TRM6/61A mutants that restore antibiotic resistance are isolated and subjected to additional successive rounds of mutation and selection under varying selection stringencies.

[0397] Those TRM6/61A variants that conferred a survival advantage to E. coli cells containing the edited selection gene of >100-fold are tested for base editing activity in human and murine cells. If N1-methyladenosine excision by the cell's native repair machinery limits editing efficiency, the methylated adenine can be protected from base excision repair by fusing to the candidate A-to-T base editor (ATBE) to a known iDAR (e.g., a TDG inhibitor, MBD4 inhibitor, or inhibitor of an AlkbH enzyme, or the catalytically inactive versions thereof) that retains a native ability to tightly bind N1-methyladenosine-containing DNA. See, e.g., Norman, D. P., Chung, S. J. & Verdine, G. L., Structural and biochemical exploration of a critical amino acid in human 8-oxo-guanine glycosylase, Biochemistry 42, 1564-1572 (2003) and Banerjee, A., Santos, W. L. & Verdine, G. L., Structure of a DNA glycosylase searching for lesions, Science 311, 1153-1157 (2006), the disclosures of each of which are incorporated by reference herein in their entireties.

[0398] Candidate ATBEs are characterized in human (HEK293T) and murine cell lines across ≥30 endogenous genomic loci to assess editing efficiency, product purity, the size of the editing window, and sequence context preferences (FIG. 2). Successive rounds of directed evolution are then performed until the resulting ATBEs perform at a level useful to the genome editing community (e.g. >20% editing, >50% product purity, <5% indels, and an editing window of 2-8 nucleotides). Similar to studies reported with previous base editors, off-target analysis are performed for candidate ATBEs at Cas9 nuclease off-targets identified by GUIDE-seq or EndoV-seq using the same sgRNAs. See Tsai, S. Q. et al., GUIDE-seq enables genome-wide profiling of off-target cleavage by CRISPR-Cas nucleases. Nature Biotechnology 33, 187-197 (2015) and Liang, P. et al. Genome-wide profiling of adenine base editor specificity by EndoV-seq. Nat. Commun. 10, 67 (2019), each of which is incorporated herein in its entirety.

[0399] If TRM6/61A ultimately proves unsuccessful, selections and evolutions are performed using other candidate N1-methyladenosine-generating enzymes that are known to alkylate purines at N1. These enzymes may include, but are not limited to, Saccharomyces cerevisiae TRM61 (monomer) or TRM61/TRM6 (dimer); human TRMT61B or TRMT10C (monomers); Escherichia coli TRM6/61A (dimer) or TrmD (monomer); M. jannaschii Trm5b or P. abyssi Trm5b, or a variant thereof.

### Equivalents and Scope

[0400] In the claims articles such as “a,” “an,” and “the” may mean one or more than one unless indicated to the contrary or otherwise evident from the context. Claims or descriptions that include “or” between one or more members of a group are considered satisfied if one, more than one, or all of the group members are present in, employed in, or otherwise relevant to a given product or process unless indicated to the contrary or otherwise evident from the context. The disclosure includes embodiments in which exactly one member of the group is present in, employed in, or otherwise relevant to a given product or process. The disclosure includes embodiments in which more than one, or all of the group members are present in, employed in, or otherwise relevant to a given product or process.

[0401] Furthermore, the disclosure encompasses all variations, combinations, and permutations in which one or more limitations, elements, clauses, and descriptive terms from one or more of the listed claims is introduced into another claim. For example, any claim that is dependent on another claim can be modified to include one or more limitations found in any other claim that is dependent on the same base claim. Where elements are presented as lists, e.g., in Markush group format, each subgroup of the elements is also disclosed, and any element(s) can be removed from the group. It should it be understood that, in general, where the disclosure, or embodiments of the disclosure, is/are referred to as comprising particular elements and/or features, certain embodiments of the disclosure or embodiments of the disclosure consist, or consist essentially of, such elements and/or features. For purposes of simplicity, those embodiments have not been specifically set forth in haec verba herein. It is also noted that the terms “comprising” and “containing” are intended to be open and permits the inclusion of additional elements or steps. Where ranges are given, endpoints are included. Furthermore, unless otherwise indicated or otherwise evident from the context and understanding of one of ordinary skill in the art, values that are expressed as ranges can assume any specific value or sub-range within the stated ranges in different embodiments of the disclosure, to the tenth of the unit of the lower limit of the range, unless the context clearly dictates otherwise.

[0402] This application refers to various issued patents, published patent applications, journal articles, and other publications, all of which are incorporated herein by reference. If there is a conflict between any of the incorporated references and the present disclosure, the specification shall control. In addition, any particular embodiment of the present disclosure that falls within the prior art may be explicitly excluded from any one or more of the claims. Because such embodiments are deemed to be known to one of ordinary skill in the art, they may be excluded even if the exclusion is not set forth explicitly herein. Any particular embodiment of the disclosure can be excluded from any claim, for any reason, whether or not related to the existence of prior art.

[0403] Those skilled in the art will recognize or be able to ascertain using no more than routine experimentation many equivalents to the specific embodiments described herein. The scope of the present embodiments described herein is not intended to be limited to the above Description, but rather is as set forth in the appended claims. Those of ordinary skill in the art will appreciate that various changes and modifications to this description may be made without departing from the spirit or scope of the present disclosure, as defined in the following claims.

What is claimed is:

1. A fusion protein comprising: (i) a nucleic acid programmable DNA binding protein (napDNAbp), and (ii) an adenosine methyltransferase.

2. The fusion protein of claim 1, wherein the adenosine methyltransferase methylates an adenosine to N1-methyladenosine (m¹A).

3. The fusion protein of claim 1 or 2, wherein the adenosine methyltransferase is a TRMT6/61A, or a variant thereof.

4. The fusion protein of claim 3, wherein the adenosine methyltransferase is a Homo sapien TRMT6/61A, or a variant thereof.

5. The fusion protein of claim 1 or 2, wherein the adenosine methyltransferase is a TRM61/TRM6, or a variant thereof.

6. The fusion protein of claim 5, wherein the adenosine methyltransferase is a Saccharomyces cerevisiae TRM61/TRM6, or a variant thereof.

7. The fusion protein of claim 1 or 2, wherein the adenosine methyltransferase is a TRM61, or a variant thereof.

8. The fusion protein of claim 7, wherein the TRM61 is a Saccharomyces cerevisiae TRM61, or a variant thereof.

9. The fusion protein of claim 1 or 2, wherein the adenosine methyltransferase is a TRMT61B, or a variant thereof.

10. The fusion protein of claim 9, wherein the TRMT61B is a Homo sapien TRMT61B, or a variant thereof.

11. The fusion protein of claim 1 or 2, wherein the adenosine methyltransferase is a TRMT10C, or a variant thereof.

12. The fusion protein of claim 11, wherein the TRMT10C is a Homo sapien TRMT10C, or a variant thereof.

13. The fusion protein of any one of claims 1-12, wherein the adenosine methyltransferase comprises an amino acid sequence that is at least 80%, 85%, 90%, 95%, 98%, or 99% identical to the amino acid sequence of any one of SEQ ID NOs: 16-21 and 57-59.

14. The fusion protein of any one of claims 1-13, wherein the adenosine methyltransferase comprises any one of the amino acid sequences of SEQ ID NOs: 16-21 and 57-59.

15. The fusion protein of any one of claims 1-14, wherein the variant of the wild-type adenosine methyltransferase is produced by evolving a methyltransferase enzyme.

16. The fusion protein of any one of claim 15, wherein the evolving includes phage assisted continuous evolution (PACE).

17. The fusion protein of any one of claims 1-16 further comprising an inhibitor of DNA alkylation repair (iDAR).

18. The fusion protein of any one of claims 1-17, wherein the fusion protein comprises the structure NH₂-[napDNAbp]-[adenosine methyltransferase]-COOH, NH₂-[adenosine methyltransferase]-[napDNAbp]-COOH, NH₂-[napDNAbp]-[adenosine methyltransferase]-[adenosine methyltransferase]-COOH or NH₂]-[adenosine methyltransferase]-[adenosine methyltransferase]-[napDNAbp]-COOH, wherein each instance of “]-[” indicates the presence of an optional linker sequence.

19. The fusion protein of claim 18, wherein the napDNAbp and the adenosine methyltransferase are fused via a linker comprising the amino acid sequence SGGSSGGSSGSETPGTSESATPESSGGSSGGS (SEQ ID NO: 5), GGG, GGGS (SEQ ID NO: 10), SGGGS (SEQ ID NO: 1), or SGSETPGTSESATPES (SEQ ID NO: 55).

20. The fusion protein of any one of claims 17-19, wherein the fusion protein comprises the structure
NH₂-[iDAR]-[napDNAbp]-[adenosine methyltransferase]-COOH;
NH₂-[napDNAbp]-[iDAR]-[adenosine methyltransferase]-COOH;
NH₂-[napDNAbp]-[adenosine methyltransferase]-[iDAR]-COOH;
NH₂-[iDAR]-[adenosine methyltransferase]-[napDNAbp]-COOH;
NH₂-[adenosine methyltransferase]-[iDAR]-[napDNAbp]-COOH; or
NH₂-[adenosine methyltransferase]-[napDNAbp]-[iDAR]-COOH, wherein each instance of “]-[” indicates the presence of an optional linker sequence.

21. The fusion protein of claim 20, wherein the napDNAbp and the adenosine methyltransferase are fused via a linker comprising the amino acid sequence SGGSSGGSSGSETPGTSESATPESSGGSSGGS (SEQ ID NO: 5), GGG, GGGS (SEQ ID NO: 10), SGGGS (SEQ ID NO: 1), or SGSETPGTSESATPES (SEQ ID NO: 55).

22. The fusion protein of claim 20 or 21, wherein the napDNAbp and the iDAR are fused via a linker comprising the amino acid sequence SGGSSGGSSGSETPGTSESATPESSGGSSGGS (SEQ ID NO: 5), GGG, GGGS (SEQ ID NO: 10), SGGGS (SEQ ID NO: 1), or SGSETPGTSESATPES (SEQ ID NO: 55).

23. The fusion protein of any one of claims 20-22, wherein the adenosine methyltransferase and the iDAR are fused via a linker comprising the amino acid sequence SGGSSGGSSGSETPGTSESATPESSGGSSGGS (SEQ ID NO: 5), GGG, GGGS (SEQ ID NO: 10), SGGGS (SEQ ID NO: 1), or SGSETPGTSESATPES (SEQ ID NO: 55).

24. The fusion protein of any one of claims 17-23, wherein the iDAR is a catalytically inactive TDG or a catalytically inactive MBD4.

25. The fusion protein of any one of claims 1-24, wherein the nucleic acid programmable DNA binding protein (napDNAbp) is a Cas9, a CasX, a CasY, a Cpf1, a C2c1, a C2c2, a C2c3, a GeoCas9, a CjCas9, a Cas12a, a Cas12b, a Cas12g, a Cas12h, a Cas12i, a Cas13b, a Cas13c, a Cas13d, a Cas14, a Csn2, an xCas9, an SpCas9-NG, an LbCas12a, an AsCas12a, a Cas9-KKH, a circularly permuted Cas9, an Argonaute (Ago), a SmacCas9, or a Spy-macCas9 domain.

26. The fusion protein of claim 25, wherein the Cas9 domain is a nuclease dead Cas9 (dCas9), a Cas9 nickase (nCas9), or a nuclease active Cas9.

27. The fusion protein of claim 25, wherein the Cas9 domain is a nuclease dead Cas9 (dCas9).

28. The fusion protein of claim 25, wherein the Cas9 domain is a Cas9 nickase (nCas9).

29. The fusion protein of claim 25, wherein the Cas9 domain is a nuclease active Cas9.

30. A polynucleotide encoding the fusion protein of any one of claims 1-29.

31. A vector comprising the polynucleotide of claim 30.

32. The vector of claim 31, wherein the vector comprises a heterologous promoter driving expression of the polynucleotide.

33. A complex comprising the fusion protein of any one of claims 1-29 and a guide RNA bound to the nucleic acid programmable DNA binding protein (napDNAbp) of the fusion protein.

34. A cell comprising the fusion protein of any one of claims 1-29, the polynucleotide of claim 30, the vector of claim 31 or 32, or the complex of claim 33.

35. A pharmaceutical composition comprising:
(i) the fusion protein of any one of claims 1-29, the polynucleotide of claim 30, the vector of claim 31 or 32, or the complex of claim 33; and
(ii) a pharmaceutically acceptable excipient.

36. A kit comprising a nucleic acid construct, comprising (i) a nucleic acid sequence encoding the fusion protein of any one of claims 1-29; and
(ii) a heterologous promoter that drives expression of the sequence of (i).

37. The kit of claim 36, further comprising an expression construct encoding a guide RNA backbone, wherein the construct comprises a cloning site positioned to allow the cloning of a nucleic acid sequence identical or complementary to a target sequence into the guide RNA backbone.

38. A kit comprising:
(i) the fusion protein of any one of claims 1-29;
(ii) a gRNA; and
(iii) target cells.

39. A method for editing a nucleobase pair of a double-stranded DNA sequence, the method comprising contacting a double stranded DNA sequence with a complex comprising the fusion protein of any one of claims 1-29, and a guide nucleic acid, wherein the double-stranded DNA comprises a target adenine (A) of an A:T nucleobase pair.

40. The method of claim 39, wherein the adenine (A) is methylated to N1-methyladenosine (m¹A).

41. The method of claim 39 or 40, whereby the step of contacting induces separation of the double-stranded DNA at a target region.

42. The method of any one of claims 39-41, whereby one strand of the double-stranded DNA is cut, wherein the one strand comprises the T of the target A:T nucleobase pair.

43. The method of any one of claims 39-42, whereby the T of the target A:T nucleobase pair is replaced with an adenine (A).

44. The method of any one of claims 40-43, whereby the N1-methyladenosine (m¹A) is replaced with a thymine (T), thereby generating a T to A point mutation.

45. The method of any one of claims 39-44, wherein the method is performed in vitro, in vivo, or ex vivo.

46. The method of any one of claims 39-45, wherein the double-stranded DNA comprises a sequence associated with a disease or disorder.

47. The method of any one of claims 39-46, wherein the double-stranded DNA is in a subject.

48. The method of claim 47, wherein the subject is human.

49. A method of treating a subject having or at risk of developing a disease, disorder, or condition, the method comprising:
administering to the subject the fusion protein of any one of claims 1-29, the polynucleotide of claim 30, the vector of claim 31 or 32, the complex of claim 33, or the pharmaceutical composition of claim 35.

50. The method of claim 49, wherein the subject has been diagnosed with a disease, disorder, or condition.

51. The method of claim 49 or 50, wherein the subject has a T to A, or an A to T mutation that is associated with a disease, disorder, or condition.

52. The method of claim 51, wherein the T of the A to T mutation is converted to an A.

53. The method of claim 51 or 52, wherein the A of the T to A mutation is converted to a T.

54. The method of claim 50, wherein the disease, disorder, or condition is sickle cell anemia, Fanconi anemia, ectodermal dysplasia skin fragility syndrome, lattice corneal dystrophy Type III, or Noonan syndrome.

55. The fusion protein of any one of claims 1-29, wherein the fusion protein does not comprise an E. coli DNA adenine methyltransferase (Dam), or a variant thereof.

56. The fusion protein of any one of claims 1-29, wherein the fusion protein does not comprise a DNA (cytosine-5)-methyltransferase 1 (DNMT1).

57. The fusion protein of claim 1 or 2, wherein the fusion protein is selected from Escherichia coli TrmD, M. jannaschii Trm5b, and P. abyssi Trm5b, or a variant thereof.

58. Use of (a) a fusion protein of any one of claims 1-29 and (b) a guide RNA targeting the base editor of (a) to a target A:T nucleobase pair in a double-stranded DNA molecule in DNA editing.

59. The use of claim 58, whereby the DNA editing comprises nicking one strand of the double-stranded DNA, wherein the one strand comprises the A of the target T:A nucleobase pair.

60. Use of a fusion protein of any one of claim 1-29 or 55-56, or a complex of claim 33, as a medicament.

The application's sequence listing, which the Patent Office published only in electronic form, follows.

SEQUENCE LISTING (141 sequences)

SEQ ID NO: 1 - protein, 5 aa, Artificial Sequence
  Synthetic polypeptide
SGGGS

SEQ ID NO: 2-4 - skipped (3 entries)

SEQ ID NO: 5 - protein, 32 aa, Artificial Sequence
  Synthetic polypeptide
SGGSSGGSSGSETPGTSESATPESSGGSSGGS

SEQ ID NO: 6 - protein, 10 aa, Artificial Sequence
  Synthetic polypeptide
SGGSGGSGGS

SEQ ID NO: 7 - protein, 17 aa, Artificial Sequence
  Synthetic polypeptide
KRTADGSEFEPKKKRKV

SEQ ID NO: 8 - protein, 4 aa, Artificial Sequence
  Synthetic polypeptide
SGGS

SEQ ID NO: 9 - protein, 1368 aa, Streptococcus pyogenes [sequence omitted]

SEQ ID NO: 10 - protein, 4 aa, Artificial Sequence
  Synthetic polypeptide
GGGS

SEQ ID NO: 11-15 - skipped (5 entries)

SEQ ID NO: 16 - protein, 497 aa, Homo sapiens
MEGSGEQPGPQPQHPGDHRIRDGDFVVLKREDVFKAVQVQRRKKVTFEKQWFYLDNVIGHSYGTAFEVTSGGSLQPKKKREEPTAETKEAGTDNRNIVDDGKSQKLTQDDIKALKDKGIKGEEIVQQLIENSTTFRDKTEFAQDKYIKKKKKKYEAIITVVKPSTRILSIMYYAREPGKINHMRYDTLAQMLTLGNIRAGNKMIVMETCAGLVLGAMMERMGGFGSIIQLYPGGGPVRAATACFGFPKSFLSGLYEFPLNKVDSLLHGTFSAKMLSSEPKDSALVEESNGTLEEKQASEQENEDSMAEAPESNHPEDQETMETISQDPEHKGPKERGSKKDYIQEKQRRQEEQRKRHLEAAALLSERNADGLIVASRFHPTPLLLSLLDFVAPSRPFVVYCQYKEPLLECYTKLRERGGVINLRLSETWLRNYQVLPDRSHPKLLMSGGGGYLLSGFTVAMDNLKADTSLKSNASTLESHETEEPAAKKRKCPESDS

SEQ ID NO: 17 - protein, 289 aa, Homo sapiens
MSFVAYEELIKEGDTAILSLGHGAMVAVRVQRGAQTQTRHGVLRHSVDLIGRPFGSKVTCGRGGWVYVLHPTPELWTLNLPHRTQILYSTDIALITMMLELRPGSVVCESGTGSGSVSHAIIRTIAPTGHLHTVEFHQQRAEKAREEFQEHRVGRWVTVRTQDVCRSGFGVSHVADAVFLDIPSPWEAVGHAWDALKVEGGRFCSFSPCIEQVQRTCQALAARGFSELSTLEVLPQVYNVRTVSLPPPDLGTGTDGPAGSDTSPFRSGTPMKEAVGHTGYLTFATKTPG

SEQ ID NO: 18 - protein, 255 aa, E. coli
MWIGIISLFPEMFRAITDYGVTGRAVKNGLLSIQSWSPRDFTHDRHRTVDDRPYGGGPGMLMMVQPLRDAIHAAKAAAGEGAKVIYLSPQGRKLDQAGVSELATNQKLILVCGRYEGIDERVIQTEIDEEWSIGDYVLSGGELPAMTLIDSVSRFIPGVLGHEASATEDSFAEGLLDCPHYTRPEVLEGMEVPPVLLSGNHAEIRRWRLKQSLGRTWLRRPELLENLALTEEQARLLAEFKTEHAQQQHKHDGMA

SEQ ID NO: 19 - protein, 478 aa, S. cerevisiae
MNALTTIDFNQHVIVRLPSKNYKIVELKPNTSVSLGKFGAFEVNDIIGYPFGLTFEIYYDGEEVSSDENRDSKPKNKIPIGKVRLLSQEIKDVNNDKDDGQSEPPLSIKEKSVSLELSSIDSSATNQNLVNMGSKAQELTVEEIEKMKQESLSSKEIIDKIIKSHKSFHNKTVYSQEKYVNRKKQKFAKYFTVEYLSSSNLLQFLIDKGDIQRVLDMSQESMGMLLNLANIQSEGNYLCMDETGGLLVYFLLERMFGGDNESKSKGKVIVIHENEHANLDLLKFANYSEKFIKEHVHTISLLDFFEPPTLQEIQSRFTPLPKEEARALKGGKKNSYYRKLRWYNTQLQILELTGEFLYDGLVMATTLHLPTLVPKLAEKIHGSRPIVCYGQFKETLLELAHTLYSDLRFLAPSILETRCRPYQSIRGKLHPLMTMKGGGGYLMWCHRVIPAPEPVSENATAADSSEKLAEHGAKKQKI

SEQ ID NO: 20 - protein, 336 aa, M. Jannaschii
MPLCLKINKKHGEQTRRILIENNLLNKDYKITSEGNYLYLPIKDVDEDILKSILNIEFELVDKELEEKKIIKKPSFREIISKKYRKEIDEGLISLSYDVVGDLVILQISDEVDEKIRKEIGELAYKLIPCKGVFRRKSEVKGEFRVRELEHLAGENRTLTIHKENGYRLWVDIAKVYFSPRLGGERARIMKKVSLNDVVVDMFAGVGPFSIACKNAKKIYAIDINPHAIELLKKNIKLNKLEHKIIPILSDVREVDVKGNRVIMNLPKFAHKFIDKALDIVEEGGVIHYYTIGKDFDKAIKLFEKKCDCEVLEKRIVKSYAPREYILALDFKINKK

SEQ ID NO: 21 - protein, 330 aa, P. Abyssi
MTLAVKVPLKEGEIVRRRLIELGALDNTYKIKREGNFLLIPVKFPVKGFEVVEAELEQVSRRPNSYREIVNVPQELRRFLPTSFDIIGNIAIIEIPEELKGYAKEIGRAIVEVHKNVKAVYMKGSKIEGEYRTRELIHIAGENITETIHRENGIRLKLDVAKVYFSPRLATERMRVFKMAQEGEVVFDMFAGVGPFSILLAKKAELVFACDINPWAIKYLEENIKLNKVNNVVPILGDSREIEVKADRIIMNLPKYAHEFLEHAISCINDGGVIHYYGFGPEGDPYGWHLERIRELANKFGVKVEVLGKRVIRNYAPRQYNIAIDFRVSF

SEQ ID NO: 22 - protein, 19 aa, Artificial Sequence
  Synthetic polypeptide
NLSKRPAAIKKAGQAKKKK

SEQ ID NO: 23 - protein, 9 aa, Artificial Sequence
  Synthetic polypeptide
PAAKRVKLD

SEQ ID NO: 24 - protein, 11 aa, Artificial Sequence
  Synthetic polypeptide
RQRRNELKRSF

SEQ ID NO: 25 - protein, 38 aa, Artificial Sequence
  Synthetic polypeptide
NQSSNFGPMKGGNFGGRSSGPYGGGGQYFAKPRNQGGY

SEQ ID NO: 26 - DNA, 23 bp, Artificial sequence
  Synthetic polynucleotide
  misc_feature (1)..(8): n is a, c, g, t or u
  misc_feature (9)..(20): n is a, c, g, t or u
  misc_feature (21)..(21): n is a, c, g, t or u
nnnnnnnnnnnnnnnnnnnnngg

SEQ ID NO: 27 - DNA, 15 bp, Artificial sequence
  Synthetic polynucleotide
  misc_feature (1)..(12): n is a, c, g, t or u
  misc_feature (13)..(13): n is a, c, g, t or u
nnnnnnnnnnnnngg

SEQ ID NO: 28 - DNA, 23 bp, Artificial sequence
  Synthetic polynucleotide
  misc_feature (1)..(9): n is a, c, g, t or u
  misc_feature (10)..(20): n is a, c, g, t or u
  misc_feature (21)..(21): n is a, c, g, t or u
nnnnnnnnnnnnnnnnnnnnngg

SEQ ID NO: 29 - DNA, 14 bp, Artificial sequence
  Synthetic polynucleotide
  misc_feature (1)..(11): n is a, c, g, t or u
  misc_feature (12)..(12): n is a, c, g, t or u
nnnnnnnnnnnngg

SEQ ID NO: 30 - DNA, 27 bp, Artificial sequence
  Synthetic polynucleotide
  misc_feature (1)..(8): n is a, c, g, t or u
  misc_feature (9)..(20): n is a, c, g, t or u
  misc_feature (21)..(22): n is a, c, g, t or u
  misc_feature (27)..(27): w is a or t
nnnnnnnnnnnnnnnnnnnnnnagaaw

SEQ ID NO: 31 - DNA, 19 bp, Artificial sequence
  Synthetic polynucleotide
  misc_feature (1)..(12): n is a, c, g, t or u
  misc_feature (13)..(14): n is a, c, g, t or u
  misc_feature (19)..(19): w is a or t
nnnnnnnnnnnnnnagaaw

SEQ ID NO: 32 - DNA, 27 bp, Artificial sequence
  Synthetic polynucleotide
  misc_feature (1)..(9): n is a, c, g, t or u
  misc_feature (10)..(20): n is a, c, g, t or u
  misc_feature (21)..(22): n is a, c, g, t or u
  misc_feature (27)..(27): w is a or t
nnnnnnnnnnnnnnnnnnnnnnagaaw

SEQ ID NO: 33 - DNA, 18 bp, Artificial sequence
  Synthetic polynucleotide
  misc_feature (1)..(11): n is a, c, g, t or u
  misc_feature (12)..(13): n is a, c, g, t or u
  misc_feature (18)..(18): w is a or t
nnnnnnnnnnnnnagaaw

SEQ ID NO: 34 - DNA, 25 bp, Artificial sequence
  Synthetic polynucleotide
  misc_feature (1)..(8): n is a, c, g, t or u
  misc_feature (9)..(20): n is a, c, g, t or u
  misc_feature (21)..(21): n is a, c, g, t or u
  misc_feature (24)..(24): n is a, c, g, t or u
nnnnnnnnnnnnnnnnnnnnnggng

SEQ ID NO: 35 - DNA, 17 bp, Artificial sequence
  Synthetic polynucleotide
  misc_feature (1)..(12): n is a, c, g, t or u
  misc_feature (13)..(13): n is a, c, g, t or u
  misc_feature (16)..(16): n is a, c, g, t or u
nnnnnnnnnnnnnggng

SEQ ID NO: 36 - DNA, 25 bp, Artificial sequence
  Synthetic polynucleotide
  misc_feature (1)..(9): n is a, c, g, t or u
  misc_feature (10)..(20): n is a, c, g, t or u
  misc_feature (21)..(21): n is a, c, g, t or u
  misc_feature (24)..(24): n is a, c, g, t or u
nnnnnnnnnnnnnnnnnnnnnggng

SEQ ID NO: 37 - DNA, 16 bp, Artificial sequence
  Synthetic polynucleotide
  misc_feature (1)..(11): n is a, c, g, t or u
  misc_feature (12)..(12): n is a, c, g, t or u
  misc_feature (15)..(15): n is a, c, g, t or u
nnnnnnnnnnnnggng

SEQ ID NO: 38 - protein, 7 aa, Artificial Sequence
  Synthetic polypeptide
PKKKRKV

SEQ ID NO: 39 - protein, 30 aa, Artificial Sequence
  Synthetic polypeptide
MDSLLMNRRKFLYQFKNVRWAKGRRETYLC

SEQ ID NO: 40 - protein, 21 aa, Artificial Sequence
  Synthetic polypeptide
  misc_feature (4)..(21): may be absent
  misc_feature (10)..(21): may be absent
GGSGGSGGSGGSGGSGGSGGS

SEQ ID NO: 41 - protein, 16 aa, Artificial Sequence
  Synthetic polypeptide
  misc_feature (3)..(12): Xaa can be any naturally occurring amino acid
KRXXXXXXXXXXKKKL

SEQ ID NO: 42 - DNA, 125 bp, Artificial Sequence
  Synthetic polynucleotide
  misc_feature (1)..(8): n  a, c, g, t or u and the base of a guide sequence
nnnnnnnngtttttgtactctcaagatttagaaataaatcttgcagaagctacaaagataaggcttcatgccgaaatcaacaccctgtcattttatggcagggtgttttcgttatttaatttttt

SEQ ID NO: 43 - DNA, 121 bp, Artificial Sequence
  Synthetic polynucleotide
  misc_feature (1)..(18): n  a, c, g, t or u and the base of a guide sequence
nnnnnnnnnnnnnnnnnngtttttgtactctcagaaatgcagaagctacaaagataaggcttcatgccgaaatcaacaccctgtcattttatggcagggtgttttcgttatttaatttttt

SEQ ID NO: 44 - DNA, 109 bp, Artificial Sequence
  Synthetic polynucleotide
  misc_feature (1)..(20): n  a, c, g, t or u and the base of a guide sequence
nnnnnnnnnnnnnnnnnnnngtttttgtactctcagaaatgcagaagctacaaagataaggcttcatgccgaaatcaacaccctgtcattttatggcagggtgtttttt

SEQ ID NO: 45 - DNA, 102 bp, Artificial Sequence
  Synthetic polynucleotide
  misc_feature (1)..(20): n  a, c, g, t or u and the base of a guide sequence
nnnnnnnnnnnnnnnnnnnngttttagagctagaaatagcaagttaaaataaggctagtccgttatcaacttgaaaaagtggcaccgagtcggtgctttttt

SEQ ID NO: 46 - DNA, 88 bp, Artificial Sequence
  Synthetic polynucleotide
  misc_feature (1)..(20): n  a, c, g, t or u and the base of a guide sequence
nnnnnnnnnnnnnnnnnnnngttttagagctagaaatagcaagttaaaataaggctagtccgttatcaacttgaaaaagtgttttttt

SEQ ID NO: 47 - DNA, 76 bp, Artificial Sequence
  Synthetic polynucleotide
  misc_feature (1)..(20): n  a, c, g, t or u and the base of a guide sequence
nnnnnnnnnnnnnnnnnnnngttttagagctagaaatagcaagttaaaataaggctagtccgttatcatttttttt

SEQ ID NO: 48 - DNA, 81 bp, Artificial Sequence
  Synthetic polynucleotide
  misc_feature (1)..(1): may be modified by a guide sequence
guuuuagagcuagaaauagcaaguuaaaauaaggcuaguccguuaucaacuugaaaaaguggcaccgagucggugcuuuuu

SEQ ID NO: 49 - protein, 150 aa, Artificial Sequence
  Synthetic polypeptide
  misc_feature (6)..(150): may be absent
GGGGSGGGGSGGGGSGGGGSGGGGSGGGGSGGGGSGGGGSGGGGSGGGGSGGGGSGGGGSGGGGSGGGGSGGGGSGGGGSGGGGSGGGGSGGGGSGGGGSGGGGSGGGGSGGGGSGGGGSGGGGSGGGGSGGGGSGGGGSGGGGSGGGGS

SEQ ID NO: 50 - protein, 30 aa, Artificial Sequence
  Synthetic polypeptide
  misc_feature (2)..(30): may be absent
GGGGGGGGGGGGGGGGGGGGGGGGGGGGGG

SEQ ID NO: 51 - protein, 150 aa, Artificial Sequence
  Synthetic polypeptide
  misc_feature (6)..(150): may be absent
EAAAKEAAAKEAAAKEAAAKEAAAKEAAAKEAAAKEAAAKEAAAKEAAAKEAAAKEAAAKEAAAKEAAAKEAAAKEAAAKEAAAKEAAAKEAAAKEAAAKEAAAKEAAAKEAAAKEAAAKEAAAKEAAAKEAAAKEAAAKEAAAKEAAAK

SEQ ID NO: 52 - protein, 90 aa, Artificial Sequence
  Synthetic polypeptide
  misc_feature (4)..(90): may be absent
GGSGGSGGSGGSGGSGGSGGSGGSGGSGGSGGSGGSGGSGGSGGSGGSGGSGGSGGSGGSGGSGGSGGSGGSGGSGGSGGSGGSGGSGGS

SEQ ID NO: 53 - protein, 120 aa, Artificial Sequence
  Synthetic polypeptide
  misc_feature (5)..(120): may be absent
SGGSSGGSSGGSSGGSSGGSSGGSSGGSSGGSSGGSSGGSSGGSSGGSSGGSSGGSSGGSSGGSSGGSSGGSSGGSSGGSSGGSSGGSSGGSSGGSSGGSSGGSSGGSSGGSSGGSSGGS

SEQ ID NO: 54 - protein, 60 aa, Artificial Sequence
  Synthetic polypeptide
  misc_feature (1)..(1): Xaa can be any naturally occurring amino acid
  misc_feature (3)..(3): Xaa can be any naturally occurring amino acid
  misc_feature (3)..(60): may be absent
  misc_feature (5)..(5): Xaa can be any naturally occurring amino acid
  misc_feature (7)..(7): Xaa can be any naturally occurring amino acid
  misc_feature (9)..(9): Xaa can be any naturally occurring amino acid
  misc_feature (11)..(11): Xaa can be any naturally occurring amino acid
  misc_feature (13)..(13): Xaa can be any naturally occurring amino acid
  misc_feature (15)..(15): Xaa can be any naturally occurring amino acid
  misc_feature (17)..(17): Xaa can be any naturally occurring amino acid
  misc_feature (19)..(19): Xaa can be any naturally occurring amino acid
  misc_feature (21)..(21): Xaa can be any naturally occurring amino acid
  misc_feature (23)..(23): Xaa can be any naturally occurring amino acid
  misc_feature (25)..(25): Xaa can be any naturally occurring amino acid
  misc_feature (27)..(27): Xaa can be any naturally occurring amino acid
  misc_feature (29)..(29): Xaa can be any naturally occurring amino acid
  misc_feature (31)..(31): Xaa can be any naturally occurring amino acid
  misc_feature (33)..(33): Xaa can be any naturally occurring amino acid
  misc_feature (35)..(35): Xaa can be any naturally occurring amino acid
  misc_feature (37)..(37): Xaa can be any naturally occurring amino acid
  misc_feature (39)..(39): Xaa can be any naturally occurring amino acid
  misc_feature (41)..(41): Xaa can be any naturally occurring amino acid
  misc_feature (43)..(43): Xaa can be any naturally occurring amino acid
  misc_feature (45)..(45): Xaa can be any naturally occurring amino acid
  misc_feature (47)..(47): Xaa can be any naturally occurring amino acid
  misc_feature (49)..(49): Xaa can be any naturally occurring amino acid
  misc_feature (51)..(51): Xaa can be any naturally occurring amino acid
  misc_feature (53)..(53): Xaa can be any naturally occurring amino acid
  misc_feature (55)..(55): Xaa can be any naturally occurring amino acid
  misc_feature (57)..(57): Xaa can be any naturally occurring amino acid
  misc_feature (59)..(59): Xaa can be any naturally occurring amino acid
XPXPXPXPXPXPXPXPXPXPXPXPXPXPXPXPXPXPXPXPXPXPXPXPXPXPXPXPXPXP

SEQ ID NO: 55 - protein, 16 aa, Artificial Sequence
  Synthetic polypeptide
SGSETPGTSESATPES

SEQ ID NO: 56 - protein, 883 aa, Artificial Sequence
  Synthetic polypeptide
MNTINIAKNDFSDIELAAIPFNTLADHYGERLAREQLALEHESYEMGEARFRKMFERQLKAGEVADNAAAKPLITTLLPKMIARINDWFEEVKAKRGKRPTAFQFLQEIKPEAVAYITIKTTLACLTSADNTTVQAVASAIGRAIEDEARFGRIRDLKAKHFKKNVEEQLNKRVGHVYKKAFMQVVEADMLSKGLLGGEAWSSWHKEDSIHVGVRCIEMLIESTGMVSLHRQNAGVVGQDSETIELAPEYAEAIATRAGALAGISPMFQPCVVPPKPWTGITGGGYWANGRRPLALVRTHSKKALMRYEDVYMPEVYKAINIAQNTAWKINKKVLAVANVITKWKHCPVEDIPAIEREELPMKPEDIDMNPEALTAWKRAAAAVYRKDKARKSRRISLEFMLEQANKFANHKAIWFPYNMDWRGRVYAVSMFNPQGNDMTKGLLTLAKGKPIGKEGYYWLKIHGANCAGVDKVPFPERIKFIEENHENIMACAKSPLENTWWAEQDSPFCFLAFCFEYAGVQHHGLSYNCSLPLAFDGSCSGIQHFSAMLRDEVGGRAVNLLPSETVQDIYGIVAKKVNEILQADAINGTDNEVVTVTDENTGEISEKVKLGTKALAGQWLAYGVTRSVTKRSVMTLAYGSKEFGFRQQVLEDTIQPAIDSGKGLMFTQPNQAAGYMAKLIWESVSVTVVAAVEAMNWLKSAAKLLAAEVKDKKTGEILRKRCAVHWVTPDGFPVWQEYKKPIQTRLNLMFLGQFRLQPTINTNKDSEIDAHKQESGIAPNFVHSQDGSHLRKTVVWAHEKYGIESFALIHDSFGTIPADAANLFKAVRETMVDTYESCDVLADFYDQFADQLHESQLDKMPALPAKGNLNLRDILESDFAFA

SEQ ID NO: 57 - protein, 383 aa, S. cerevisiae
MSTNCFSGYKDLIKEGDLTLIWVSRDNIKPVRMHSEEVFNTRYGSFPHKDIIGKPYGSQIAIRTKGSNKFAFVHVLQPTPELWTLSLPHRTQIVYTPDSSYIMQRLNCSPHSRVIEAGTGSGSFSHAFARSVGHLFSFEFHHIRYEQALEEFKEHGLIDDNVTITHRDVCQGGFLIKKGDTTSYEFGNNETAASLNANVVFLDLPAPWDAIPHLDSVISVDEKVGLCCFSPCIEQVDKTLDVLEKYGWTDVEMVEIQGRQYESRRQMVRSLNDALERLRDIKRHKLQGVERRKRMFNNTIDSNDEKVGKRNEDGVPLTEKAKFNPFGKGSRIKEGDSNYKWKEVTKMEAEIKSHTSYLTFAFKVVNRSRDDEKVNEILRSTEK

SEQ ID NO: 58 - protein, 477 aa, Homo sapiens [sequence omitted]

SEQ ID NO: 59 - protein, 403 aa, Homo sapiens
MAAFLKMSVSVNFFRPFTRFLVPFTLHRKRNNLTILQRYMSSKIPAVTYPKNESTPPSEELELDKWKTTMKSSVQEECVSTISSSKDEDPLAATREFIEMWRLLGREVPEHITEEELKTLMECVSNTAKKKYLKYLYTKEKVKKARQIKKEMKAAAREEAKNIKLLETTEEDKQKNFLFLRLWDRNMDIAMGWKGAQAMQFGQPLVFDMAYENYMKRKELQNTVSQLLESEGWNRRNVDPFHIYFCNLKIDGALHRELVKRYQEKWDKLLLTSTEKSHVDLFPKDSIIYLTADSPNVMTTFRHDKVYVIGSFVDKSMQPGTSLAKAKRLNLATECLPLDKYLQWEIGNKNLTLDQMIRILLCLKNNGNWQEALQFVPKRKHTGFLEISQHSQEFINRLKKAKT

SEQ ID NO: 60 - protein, 410 aa, Homo sapiens
MEAENAGSYSLQQAQAFYTFPFQQLMAEAPNMAVVNEQQMPEEVPAPAPAQEPVQEAPKGRKRKPRTTEPKQPVEPKKPVESKKSGKSAKSKEKQEKITDTFKVKRKVDRFNGVSEAELLTKTLPDILTFNLDIVIIGINPGLMAAYKGHHYPGPGNHFWKCLFMSGLSEVQLNHMDDHTLPGKYGIGFTNMVERTTPGSKDLSSKEFREGGRILVQKLQKYQPRIAVFNGKCIYEIFSKEVFGVKVKNLEFGLQPHKIPDTETLCYVMPSSSARCAQFPRAQDKVHYYIKLKDLRDQLKGIERNMDVQEVQYTFDLQLAQEDAKKMAVKEEKYDPGYEAAYGGAYGENPCSSEPCGFSSNGLIESVELRGESAFSGIPNGQWMTQSFTDQIPSFSNHCGTQEQEEESHA

SEQ ID NO: 61 - protein, 345 aa, Homo sapiens
MPARALLPRRMGHRTLASTPALWASIPCPRSELRLDLVLPSGQSFRWREQSPAHWSGVLADQVWTLTQTEEQLHCTVYRGDKSQASRPTPDELEAVRKYFQLDVTLAQLYHHWGSVDSHFQEVAQKFQGVRLLRQDPIECLFSFICSSNNNIARITGMVERLCQAFGPRLIQLDDVTYHGFPSLQALAGPEVEAHLRKLGLGYRARYVSASARAILEEQGGLAWLQQLRESSYEEAHKALCILPGVGTKVADCICLMALDKPQAVPVDVHMWHIAQRDYSWHPTTSQAKGPSPQTNKELGNFFRSLWGPYAGWAQAVLFSADLRQSRHAQEPPAKRRKGSKGPEG

SEQ ID NO: 62 - protein, 298 aa, Homo sapiens
MVTPALQMKKPKQFCRRMGQKKQRPARAGQPHSSSDAAQAPAEQPHSSSDAAQAPCPRERCLGPPTTPGPYRSIYFSSPKGHLTRLGLEFFDQPAVPLARAFLGQVLVRRLPNGTELRGRIVETEAYLGPEDEAAHSRGGRQTPRNRGMFMKPGTLYVYIIYGMYFCMNISSQGDGACVLLRALEPLEGLETMRQLRSTLRKGTASRVLKDRELCSGPSKLCQALAINKSFDQRDLAQDEAVWLERGPLEPSEPAVVAAARVGVGHAGEWARKPLRFYVRGSPWVSVVDRVAEQDTQA

SEQ ID NO: 63 - protein, 580 aa, Homo sapiens
MGTTGLESLSLGDRGAAPTVTSSERLVPDPPNDLRKEDVAMELERVGEDEEQMMIKRSSECNPLLQEPIASAQFGATAGTECRKSVPCGWERVVKQRLFGKTAGRFDVYFISPQGLKFRSKSSLANYLHKNGETSLKPEDFDFTVLSKRGIKSRYKDCSMAALTSHLQNQSNNSNWNLRTRSKCKKDVFMPPSSSSELQESRGLSNFTSTHLLLKEDEGVDDVNFRKVRKPKGKVTILKGIPIKKTKKGCRKSCSGFVQSDSKRESVCNKADAESEPVAQKSQLDRTVCISDAGACGETLSVTSEENSLVKKKERSLSSGSNFCSEQKTSGIINKFCSAKDSEHNEKYEDTFLESEEIGTKVEVVERKEHLHTDILKRGSEMDNNCSPTRKDFTGEKIFQEDTIPRTQIERRKTSLYFSSKYNKEALSPPRRKAFKKWTPPRSPFNLVQETLFHDPWKLLIATIFLNRTSGKMAIPVLWKFLEKYPSAEVARTADWRDVSELLKPLGLYDLRAKTIVKFSDEYLTKQWKYPIELHGIGKYGNDSYRIFCVNEWKQVHPEDHKLNKYHDWLWENHEKLSLS

SEQ ID NO: 64 - DNA, 4104 bp, Streptococcus pyogenes
atggataaaaaatatagcattggcctggatattggcaccaacagcgtgggctgggcggtgattaccgatgaatataaagtgccgagcaaaaaatttaaagtgctgggcaacaccgatcgccatagcattaaaaaaaacctgattggcgcgctgctgtttgatagcggcgaaaccgcggaagcgacccgcctgaaacgcaccgcgcgccgccgctatacccgccgcaaaaaccgcatttgctatctgcaggaaatttttagcaacgaaatggcgaaagtggatgatagcttttttcatcgcctggaagaaagctttctggtggaagaagataaaaaacatgaacgccatccgatttttggcaacattgtggatgaagtggcgtatcatgaaaaatatccgaccatttatcatctgcgcaaaaaactggtggatagcaccgataaagcggatctgcgcctgatttatctggcgctggcgcatatgattaaatttcgcggccattttctgattgaaggcgatctgaacccggataacagcgatgtggataaactgtttattcagctggtgcagacctataaccagctgtttgaagaaaacccgattaacgcgagcggcgtggatgcgaaagcgattctgagcgcgcgcctgagcaaaagccgccgcctggaaaacctgattgcgcagctgccgggcgaaaaaaaaaacggcctgtttggcaacctgattgcgctgagcctgggcctgaccccgaactttaaaagcaactttgatctggcggaagatgcgaaactgcagctgagcaaagatacctatgatgatgatctggataacctgctggcgcagattggcgatcagtatgcggatctgtttctggcggcgaaaaacctgagcgatgcgattctgctgagcgatattctgcgcgtgaacaccgaaattaccaaagcgccgctgagcgcgagcatgattaaacgctatgatgaacatcatcaggatctgaccctgctgaaagcgctggtgcgccagcagctgccggaaaaatataaagaaattttttttgatcagagcaaaaacggctatgcgggctatattgatggcggcgcgagccaggaagaattttataaatttattaaaccgattctggaaaaaatggatggcaccgaagaactgctggtgaaactgaaccgcgaagatctgctgcgcaaacagcgcacctttgataacggcagcattccgcatcagattcatctgggcgaactgcatgcgattctgcgccgccaggaagatttttatccgtttctgaaagataaccgcgaaaaaattgaaaaaattctgacctttcgcattccgtattatgtgggcccgctggcgcgcggcaacagccgctttgcgtggatgacccgcaaaagcgaagaaaccattaccccgtggaactttgaagaagtggtggataaaggcgcgagcgcgcagagctttattgaacgcatgaccaactttgataaaaacctgccgaacgaaaaagtgctgccgaaacatagcctgctgtatgaatattttaccgtgtataacgaactgaccaaagtgaaatatgtgaccgaaggcatgcgcaaaccggcgtttctgagcggcgaacagaaaaaagcgattgtggatctgctgtttaaaaccaaccgcaaagtgaccgtgaaacagctgaaagaagattattttaaaaaaattgaatgctttgatagcgtggaaattagcggcgtggaagatcgctttaacgcgagcctgggcacctatcatgatctgctgaaaattattaaagataaagattttctggataacgaagaaaacgaagatattctggaagatattgtgctgaccctgaccctgtttgaagatcgcgaaatgattgaagaacgcctgaaaacctatgcgcatctgtttgatgataaagtgatgaaacagctgaaacgccgccgctataccggctggggccgcctgagccgcaaactgattaacggcattcgcgataaacagagcggcaaaaccattctggattttctgaaaagcgatggctttgcgaaccgcaactttatgcagctgattcatgatgatagcctgacctttaaagaagatattcagaaagcgcaggtgagcggccagggcgatagcctgcatgaacatattgcgaacctggcgggcagcccggcgattaaaaaaggcattctgcagaccgtgaaagtggtggatgaactggtgaaagtgatgggccgccataaaccggaaaacattgtgattgaaatggcgcgcgaaaaccagaccacccagaaaggccagaaaaacagccgcgaacgcatgaaacgcattgaagaaggcattaaagaactgggcagccagattctgaaagaacatccggtggaaaacacccagctgcagaacgaaaaactgtatctgtattatctgcagaacggccgcgatatgtatgtggatcaggaactggatattaaccgcctgagcgattatgatgtggatcatattgtgccgcagagctttctgaaagatgatagcattgataacaaagtgctgacccgcagcgataaaaaccgcggcaaaagcgataacgtgccgagcgaagaagtggtgaaaaaaatgaaaaactattggcgccagctgctgaacgcgaaactgattacccagcgcaaatttgataacctgaccaaagcggaacgcggcggcctgagcgaactggataaagcgggctttattaaacgccagctggtggaaacccgccagattaccaaacatgtggcgcagattctggatagccgcatgaacaccaaatatgatgaaaacgataaactgattcgcgaagtgaaagtgattaccctgaaaagcaaactggtgagcgattttcgcaaagattttcagttttataaagtgcgcgaaattaacaactatcatcatgcgcatgatgcgtatctgaacgcggtggtgggcaccgcgctgattaaaaaatatccgaaactggaaagcgaatttgtgtatggcgattataaagtgtatgatgtgcgcaaaatgattgcgaaaagcgaacaggaaattggcaaagcgaccgcgaaatattttttttatagcaacattatgaacttttttaaaaccgaaattaccctggcgaacggcgaaattcgcaaacgcccgctgattgaaaccaacggcgaaaccggcgaaattgtgtgggataaaggccgcgattttgcgaccgtgcgcaaagtgctgagcatgccgcaggtgaacattgtgaaaaaaaccgaagtgcagaccggcggctttagcaaagaaagcattctgccgaaacgcaacagcgataaactgattgcgcgcaaaaaagattgggatccgaaaaaatatggcggctttgatagcccgaccgtggcgtatagcgtgctggtggtggcgaaagtggaaaaaggcaaaagcaaaaaactgaaaagcgtgaaagaactgctgggcattaccattatggaacgcagcagctttgaaaaaaacccgattgattttctggaagcgaaaggctataaagaagtgaaaaaagatctgattattaaactgccgaaatatagcctgtttgaactggaaaacggccgcaaacgcatgctggcgagcgcgggcgaactgcagaaaggcaacgaactggcgctgccgagcaaatatgtgaactttctgtatctggcgagccattatgaaaaactgaaaggcagcccggaagataacgaacagaaacagctgtttgtggaacagcataaacattatctggatgaaattattgaacagattagcgaatttagcaaacgcgtgattctggcggatgcgaacctggataaagtgctgagcgcgtataacaaacatcgcgataaaccgattcgcgaacaggcggaaaacattattcatctgtttaccctgaccaacctgggcgcgccggcggcgtttaaatattttgataccaccattgatcgcaaacgctataccagcaccaaagaagtgctggatgcgaccctgattcatcagagcattaccggcctgtatgaaacccgcattgatctgagccagctgggcggcgat

SEQ ID NO: 65 - DNA, 4104 bp, Streptococcus pyogenes
atggataagaaatactcaataggcttagatatcggcacaaatagcgtcggatgggcggtgatcactgatgattataaggttccgtctaaaaagttcaaggttctgggaaatacagaccgccacagtatcaaaaaaaatcttataggggctcttttatttggcagtggagagacagcggaagcgactcgtctcaaacggacagctcgtagaaggtatacacgtcggaagaatcgtatttgttatctacaggagattttttcaaatgagatggcgaaagtagatgatagtttctttcatcgacttgaagagtcttttttggtggaagaagacaagaagcatgaacgtcatcctatttttggaaatatagtagatgaagttgcttatcatgagaaatatccaactatctatcatctgcgaaaaaaattggcagattctactgataaagcggatttgcgcttaatctatttggccttagcgcatatgattaagtttcgtggtcattttttgattgagggagatttaaatcctgataatagtgatgtggacaaactatttatccagttggtacaaatctacaatcaattatttgaagaaaaccctattaacgcaagtagagtagatgctaaagcgattctttctgcacgattgagtaaatcaagacgattagaaaatctcattgctcagctccccggtgagaagagaaatggcttgtttgggaatctcattgctttgtcattgggattgacccctaattttaaatcaaattttgatttggcagaagatgctaaattacagctttcaaaagatacttacgatgatgatttagataatttattggcgcaaattggagatcaatatgctgatttgtttttggcagctaagaatttatcagatgctattttactttcagatatcctaagagtaaatagtgaaataactaaggctcccctatcagcttcaatgattaagcgctacgatgaacatcatcaagacttgactcttttaaaagctttagttcgacaacaacttccagaaaagtataaagaaatcttttttgatcaatcaaaaaacggatatgcaggttatattgatgggggagctagccaagaagaattttataaatttatcaaaccaattttagaaaaaatggatggtactgaggaattattggtgaaactaaatcgtgaagatttgctgcgcaagcaacggacctttgacaacggctctattccccatcaaattcacttgggtgagctgcatgctattttgagaagacaagaagacttttatccatttttaaaagacaatcgtgagaagattgaaaaaatcttgacttttcgaattccttattatgttggtccattggcgcgtggcaatagtcgttttgcatggatgactcggaagtctgaagaaacaattaccccatggaattttgaagaagttgtcgataaaggtgcttcagctcaatcatttattgaacgcatgacaaactttgataaaaatcttccaaatgaaaaagtactaccaaaacatagtttgctttatgagtattttacggtttataacgaattgacaaaggtcaaatatgttactgagggaatgcgaaaaccagcatttctttcaggtgaacagaagaaagccattgttgatttactcttcaaaacaaatcgaaaagtaaccgttaagcaattaaaagaagattatttcaaaaaaatagaatgttttgatagtgttgaaatttcaggagttgaagatagatttaatgcttcattaggcgcctaccatgatttgctaaaaattattaaagataaagattttttggataatgaagaaaatgaagatatcttagaggatattgttttaacattgaccttatttgaagatagggggatgattgaggaaagacttaaaacatatgctcacctctttgatgataaggtgatgaaacagcttaaacgtcgccgttatactggttggggacgtttgtctcgaaaattgattaatggtattagggataagcaatctggcaaaacaatattagattttttgaaatcagatggttttgccaatcgcaattttatgcagctgatccatgatgatagtttgacatttaaagaagatattcaaaaagcacaggtgtctggacaaggccatagtttacatgaacagattgctaacttagctggcagtcctgctattaaaaaaggtattttacagactgtaaaaattgttgatgaactggtcaaagtaatggggcataagccagaaaatatcgttattgaaatggcacgtgaaaatcagacaactcaaaagggccagaaaaattcgcgagagcgtatgaaacgaatcgaagaaggtatcaaagaattaggaagtcagattcttaaagagcatcctgttgaaaatactcaattgcaaaatgaaaagctctatctctattatctacaaaatggaagagacatgtatgtggaccaagaattagatattaatcgtttaagtgattatgatgtcgatcacattgttccacaaagtttcattaaagacgattcaatagacaataaggtactaacgcgttctgataaaaatcgtggtaaatcggataacgttccaagtgaagaagtagtcaaaaagatgaaaaactattggagacaacttctaaacgccaagttaatcactcaacgtaagtttgataatttaacgaaagctgaacgtggaggtttgagtgaacttgataaagctggttttatcaaacgccaattggttgaaactcgccaaatcactaagcatgtggcacaaattttggatagtcgcatgaatactaaatacgatgaaaatgataaacttattcgagaggttaaagtgattaccttaaaatctaaattagtttctgacttccgaaaagatttccaattctataaagtacgtgagattaacaattaccatcatgcccatgatgcgtatctaaatgccgtcgttggaactgctttgattaagaaatatccaaaacttgaatcggagtttgtctatggtgattataaagtttatgatgttcgtaaaatgattgctaagtctgagcaagaaataggcaaagcaaccgcaaaatatttcttttactctaatatcatgaacttcttcaaaacagaaattacacttgcaaatggagagattcgcaaacgccctctaatcgaaactaatggggaaactggagaaattgtctgggataaagggcgagattttgccacagtgcgcaaagtattgtccatgccccaagtcaatattgtcaagaaaacagaagtacagacaggcggattctccaaggagtcaattttaccaaaaagaaattcggacaagcttattgctcgtaaaaaagactgggatccaaaaaaatatggtggttttgatagtccaacggtagcttattcagtcctagtggttgctaaggtggaaaaagggaaatcgaagaagttaaaatccgttaaagagttactagggatcacaattatggaaagaagttcctttgaaaaaaatccgattgactttttagaagctaaaggatataaggaagttaaaaaagacttaatcattaaactacctaaatatagtctttttgagttagaaaacggtcgtaaacggatgctggctagtgccggagaattacaaaaaggaaatgagctggctctgccaagcaaatatgtgaattttttatatttagctagtcattatgaaaagttgaagggtagtccagaagataacgaacaaaaacaattgtttgtggagcagcataagcattatttagatgagattattgagcaaatcagtgaattttctaagcgtgttattttagcagatgccaatttagataaagttcttagtgcatataacaaacatagagacaaaccaatacgtgaacaagcagaaaatattattcatttatttacgttgacgaatcttggagctcccgctgcttttaaatattttgatacaacaattgatcgtaaacgatatacgtctacaaaagaagttttagatgccactcttatccatcaatccatcactggtctttatgaaacacgcattgatttgagtcagctaggaggtgactga

SEQ ID NO: 66 - protein, 1367 aa, Streptococcus pyogenes
MDKKYSIGLDIGTNSVGWAVITDDYKVPSKKFKVLGNTDRHSIKKNLIGALLFGSGETAEATRLKRTARRRYTRRKNRICYLQEIFSNEMAKVDDSFFHRLEESFLVEEDKKHERHPIFGNIVDEVAYHEKYPTIYHLRKKLADSTDKADLRLIYLALAHMIKFRGHFLIEGDLNPDNSDVDKLFIQLVQIYNQLFEENPINASRVDAKAILSARLSKSRRLENLIAQLPGEKRNGLFGNLIALSLGLTPNFKSNFDLAEDAKLQLSKDTYDDDLDNLLAQIGDQYADLFLAAKNLSDAILLSDILRVNSEITKAPLSASMIKRYDEHHQDLTLLKALVRQQLPEKYKEIFFDQSKNGYAGYIDGGASQEEFYKFIKPILEKMDGTEELLVKLNREDLLRKQRTFDNGSIPHQIHLGELHAILRRQEDFYPFLKDNREKIEKILTFRIPYYVGPLARGNSRFAWMTRKSEETITPWNFEEVVDKGASAQSFIERMTNFDKNLPNEKVLPKHSLLYEYFTVYNELTKVKYVTEGMRKPAFLSGEQKKAIVDLLFKTNRKVTVKQLKEDYFKKIECFDSVEISGVEDRFNASLGAYHDLLKIIKDKDFLDNEENEDILEDIVLTLTLFEDRGMIEERLKTYAHLFDDKVMKQLKRRRYTGWGRLSRKLINGIRDKQSGKTILDFLKSDGFANRNFMQLIHDDSLTFKEDIQKAQVSGQGHSLHEQIANLAGSPAIKKGILQTVKIVDELVKVMGHKPENIVIEMARENQTTQKGQKNSRERMKRIEEGIKELGSQILKEHPVENTQLQNEKLYLYYLQNGRDMYVDQELDINRLSDYDVDHIVPQSFIKDDSIDNKVLTRSDKNRGKSDNVPSEEVVKKMKNYWRQLLNAKLITQRKFDNLTKAERGGLSELDKAGFIKRQLVETRQITKHVAQILDSRMNTKYDENDKLIREVKVITLKSKLVSDFRKDFQFYKVREINNYHHAHDAYLNAVVGTALIKKYPKLESEFVYGDYKVYDVRKMIAKSEQEIGKATAKYFFYSNIMNFFKTEITLANGEIRKRPLIETNGETGEIVWDKGRDFATVRKVLSMPQVNIVKKTEVQTGGFSKESILPKRNSDKLIARKKDWDPKKYGGFDSPTVAYSVLVVAKVEKGKSKKLKSVKELLGITIMERSSFEKNPIDFLEAKGYKEVKKDLIIKLPKYSLFELENGRKRMLASAGELQKGNELALPSKYVNFLYLASHYEKLKGSPEDNEQKQLFVEQHKHYLDEIIEQISEFSKRVILADANLDKVLSAYNKHRDKPIREQAENIIHLFTLTNLGAPAAFKYFDTTIDRKRYTSTKEVLDATLIHQSITGLYETRIDLSQLGGD

SEQ ID NO: 67 - DNA, 4212 bp, Streptococcus pyogenes
atggataaaaagtattctattggtttagacatcggcactaattccgttggatgggctgtcataaccgatgaatacaaagtaccttcaaagaaatttaaggtgttggggaacacagaccgtcattcgattaaaaagaatcttatcggtgccctcctattcgatagtggcgaaacggcagaggcgactcgcctgaaacgaaccgctcggagaaggtatacacgtcgcaagaaccgaatatgttacttacaagaaatttttagcaatgagatggccaaagttgacgattctttctttcaccgtttggaagagtccttccttgtcgaagaggacaagaaacatgaacggcaccccatctttggaaacatagtagatgaggtggcatatcatgaaaagtacccaacgatttatcacctcagaaaaaagctagttgactcaactgataaagcggacctgaggttaatctacttggctcttgcccatatgataaagttccgtgggcactttctcattgagggtgatctaaatccggacaactcggatgtcgacaaactgttcatccagttagtacaaacctataatcagttgtttgaagagaaccctataaatgcaagtggcgtggatgcgaaggctattcttagcgcccgcctctctaaatcccgacggctagaaaacctgatcgcacaattacccggagagaagaaaaatgggttgttcggtaaccttatagcgctctcactaggcctgacaccaaattttaagtcgaacttcgacttagctgaagatgccaaattgcagcttagtaaggacacgtacgatgacgatctcgacaatctactggcacaaattggagatcagtatgcggacttatttttggctgccaaaaaccttagcgatgcaatcctcctatctgacatactgagagttaatactgagattaccaaggcgccgttatccgcttcaatgatcaaaaggtacgatgaacatcaccaagacttgacacttctcaaggccctagtccgtcagcaactgcctgagaaatataaggaaatattctttgatcagtcgaaaaacgggtacgcaggttatattgacggcggagcgagtcaagaggaattctacaagtttatcaaacccatattagagaagatggatgggacggaagagttgcttgtaaaactcaatcgcgaagatctactgcgaaagcagcggactttcgacaacggtagcattccacatcaaatccacttaggcgaattgcatgctatacttagaaggcaggaggatttttatccgttcctcaaagacaatcgtgaaaagattgagaaaatcctaacctttcgcataccttactatgtgggacccctggcccgagggaactctcggttcgcatggatgacaagaaagtccgaagaaacgattactccatggaattttgaggaagttgtcgataaaggtgcgtcagctcaatcgttcatcgagaggatgaccaactttgacaagaatttaccgaacgaaaaagtattgcctaagcacagtttactttacgagtatttcacagtgtacaatgaactcacgaaagttaagtatgtcactgagggcatgcgtaaacccgcctttctaagcggagaacagaagaaagcaatagtagatctgttattcaagaccaaccgcaaagtgacagttaagcaattgaaagaggactactttaagaaaattgaatgcttcgattctgtcgagatctccggggtagaagatcgatttaatgcgtcacttggtacgtatcatgacctcctaaagataattaaagataaggacttcctggataacgaagagaatgaagatatcttagaagatatagtgttgactcttaccctctttgaagatcgggaaatgattgaggaaagactaaaaacatacgctcacctgttcgacgataaggttatgaaacagttaaagaggcgtcgctatacgggctggggacgattgtcgcggaaacttatcaacgggataagagacaagcaaagtggtaaaactattctcgattttctaaagagcgacggcttcgccaataggaactttatgcagctgatccatgatgactctttaaccttcaaagaggatatacaaaaggcacaggtttccggacaaggggactcattgcacgaacatattgcgaatcttgctggttcgccagccatcaaaaagggcatactccagacagtcaaagtagtggatgagctagttaaggtcatgggacgtcacaaaccggaaaacattgtaatcgagatggcacgcgaaaatcaaacgactcagaaggggcaaaaaaacagtcgagagcggatgaagagaatagaagagggtattaaagaactgggcagccagatcttaaaggagcatcctgtggaaaatacccaattgcagaacgagaaactttacctctattacctacaaaatggaagggacatgtatgttgatcaggaactggacataaaccgtttatctgattacgacgtcgatcacattgtaccccaatcctttttgaaggacgattcaatcgacaataaagtgcttacacgctcggataagaaccgagggaaaagtgacaatgttccaagcgaggaagtcgtaaagaaaatgaagaactattggcggcagctcctaaatgcgaaactgataacgcaaagaaagttcgataacttaactaaagctgagaggggtggcttgtctgaacttgacaaggccggatttattaaacgtcagctcgtggaaacccgccaaatcacaaagcatgttgcacagatactagattcccgaatgaatacgaaatacgacgagaacgataagctgattcgggaagtcaaagtaatcactttaaagtcaaaattggtgtcggacttcagaaaggattttcaattctataaagttagggagataaataactaccaccatgcgcacgacgcttatcttaatgccgtcgtagggaccgcactcattaagaaatacccgaagctagaaagtgagtttgtgtatggtgattacaaagtttatgacgtccgtaagatgatcgcgaaaagcgaacaggagataggcaaggctacagccaaatacttcttttattctaacattatgaatttctttaagacggaaatcactctggcaaacggagagatacgcaaacgacctttaattgaaaccaatggggagacaggtgaaatcgtatgggataagggccgggacttcgcgacggtgagaaaagttttgtccatgccccaagtcaacatagtaaagaaaactgaggtgcagaccggagggttttcaaaggaatcgattcttccaaaaaggaatagtgataagctcatcgctcgtaaaaaggactgggacccgaaaaagtacggtggcttcgatagccctacagttgcctattctgtcctagtagtggcaaaagttgagaagggaaaatccaagaaactgaagtcagtcaaagaattattggggataacgattatggagcgctcgtcttttgaaaagaaccccatcgacttccttgaggcgaaaggttacaaggaagtaaaaaaggatctcataattaaactaccaaagtatagtctgtttgagttagaaaatggccgaaaacggatgttggctagcgccggagagcttcaaaaggggaacgaactcgcactaccgtctaaatacgtgaatttcctgtatttagcgtcccattacgagaagttgaaaggttcacctgaagataacgaacagaagcaactttttgttgagcagcacaaacattatctcgacgaaatcatagagcaaatttcggaattcagtaagagagtcatcctagctgatgccaatctggacaaagtattaagcgcatacaacaagcacagggataaacccatacgtgagcaggcggaaaatattatccatttgtttactcttaccaacctcggcgctccagccgcattcaagtattttgacacaacgatagatcgcaaacgatacacttctaccaaggaggtgctagacgcgacactgattcaccaatccatcacgggattatatgaaactcggatagatttgtcacagcttgggggtgacggatcccccaagaagaagaggaaagtctcgagcgactacaaagaccatgacggtgattataaagatcatgacatcgattacaaggatgacgatgacaaggctgcagga

SEQ ID NO: 68 - protein, 1404 aa, Streptococcus pyogenes
MDKKYSIGLDIGTNSVGWAVITDEYKVPSKKFKVLGNTDRHSIKKNLIGALLFDSGETAEATRLKRTARRRYTRRKNRICYLQEIFSNEMAKVDDSFFHRLEESFLVEEDKKHERHPIFGNIVDEVAYHEKYPTIYHLRKKLVDSTDKADLRLIYLALAHMIKFRGHFLIEGDLNPDNSDVDKLFIQLVQTYNQLFEENPINASGVDAKAILSARLSKSRRLENLIAQLPGEKKNGLFGNLIALSLGLTPNFKSNFDLAEDAKLQLSKDTYDDDLDNLLAQIGDQYADLFLAAKNLSDAILLSDILRVNTEITKAPLSASMIKRYDEHHQDLTLLKALVRQQLPEKYKEIFFDQSKNGYAGYIDGGASQEEFYKFIKPILEKMDGTEELLVKLNREDLLRKQRTFDNGSIPHQIHLGELHAILRRQEDFYPFLKDNREKIEKILTFRIPYYVGPLARGNSRFAWMTRKSEETITPWNFEEVVDKGASAQSFIERMTNFDKNLPNEKVLPKHSLLYEYFTVYNELTKVKYVTEGMRKPAFLSGEQKKAIVDLLFKTNRKVTVKQLKEDYFKKIECFDSVEISGVEDRFNASLGTYHDLLKIIKDKDFLDNEENEDILEDIVLTLTLFEDREMIEERLKTYAHLFDDKVMKQLKRRRYTGWGRLSRKLINGIRDKQSGKTILDFLKSDGFANRNFMQLIHDDSLTFKEDIQKAQVSGQGDSLHEHIANLAGSPAIKKGILQTVKVVDELVKVMGRHKPENIVIEMARENQTTQKGQKNSRERMKRIEEGIKELGSQILKEHPVENTQLQNEKLYLYYLQNGRDMYVDQELDINRLSDYDVDHIVPQSFLKDDSIDNKVLTRSDKNRGKSDNVPSEEVVKKMKNYWRQLLNAKLITQRKFDNLTKAERGGLSELDKAGFIKRQLVETRQITKHVAQILDSRMNTKYDENDKLIREVKVITLKSKLVSDFRKDFQFYKVREINNYHHAHDAYLNAVVGTALIKKYPKLESEFVYGDYKVYDVRKMIAKSEQEIGKATAKYFFYSNIMNFFKTEITLANGEIRKRPLIETNGETGEIVWDKGRDFATVRKVLSMPQVNIVKKTEVQTGGFSKESILPKRNSDKLIARKKDWDPKKYGGFDSPTVAYSVLVVAKVEKGKSKKLKSVKELLGITIMERSSFEKNPIDFLEAKGYKEVKKDLIIKLPKYSLFELENGRKRMLASAGELQKGNELALPSKYVNFLYLASHYEKLKGSPEDNEQKQLFVEQHKHYLDEIIEQISEFSKRVILADANLDKVLSAYNKHRDKPIREQAENIIHLFTLTNLGAPAAFKYFDTTIDRKRYTSTKEVLDATLIHQSITGLYETRIDLSQLGGDGSPKKKRKVSSDYKDHDGDYKDHDIDYKDDDDKAAG

SEQ ID NO: 69 - DNA, 4107 bp, Streptococcus pyogenes
atggataagaaatactcaataggcttagatatcggcacaaatagcgtcggatgggcggtgatcactgatgaatataaggttccgtctaaaaagttcaaggttctgggaaatacagaccgccacagtatcaaaaaaaatcttataggggctcttttatttgacagtggagagacagcggaagcgactcgtctcaaacggacagctcgtagaaggtatacacgtcggaagaatcgtatttgttatctacaggagattttttcaaatgagatggcgaaagtagatgatagtttctttcatcgacttgaagagtcttttttggtggaagaagacaagaagcatgaacgtcatcctatttttggaaatatagtagatgaagttgcttatcatgagaaatatccaactatctatcatctgcgaaaaaaattggtagattctactgataaagcggatttgcgcttaatctatttggccttagcgcatatgattaagtttcgtggtcattttttgattgagggagatttaaatcctgataatagtgatgtggacaaactatttatccagttggtacaaacctacaatcaattatttgaagaaaaccctattaacgcaagtggagtagatgctaaagcgattctttctgcacgattgagtaaatcaagacgattagaaaatctcattgctcagctccccggtgagaagaaaaatggcttatttgggaatctcattgctttgtcattgggtttgacccctaattttaaatcaaattttgatttggcagaagatgctaaattacagctttcaaaagatacttacgatgatgatttagataatttattggcgcaaattggagatcaatatgctgatttgtttttggcagctaagaatttatcagatgctattttactttcagatatcctaagagtaaatactgaaataactaaggctcccctatcagcttcaatgattaaacgctacgatgaacatcatcaagacttgactcttttaaaagctttagttcgacaacaacttccagaaaagtataaagaaatcttttttgatcaatcaaaaaacggatatgcaggttatattgatgggggagctagccaagaagaattttataaatttatcaaaccaattttagaaaaaatggatggtactgaggaattattggtgaaactaaatcgtgaagatttgctgcgcaagcaacggacctttgacaacggctctattccccatcaaattcacttgggtgagctgcatgctattttgagaagacaagaagacttttatccatttttaaaagacaatcgtgagaagattgaaaaaatcttgacttttcgaattccttattatgttggtccattggcgcgtggcaatagtcgttttgcatggatgactcggaagtctgaagaaacaattaccccatggaattttgaagaagttgtcgataaaggtgcttcagctcaatcatttattgaacgcatgacaaactttgataaaaatcttccaaatgaaaaagtactaccaaaacatagtttgctttatgagtattttacggtttataacgaattgacaaaggtcaaatatgttactgaaggaatgcgaaaaccagcatttctttcaggtgaacagaagaaagccattgttgatttactcttcaaaacaaatcgaaaagtaaccgttaagcaattaaaagaagattatttcaaaaaaatagaatgttttgatagtgttgaaatttcaggagttgaagatagatttaatgcttcattaggtacctaccatgatttgctaaaaattattaaagataaagattttttggataatgaagaaaatgaagatatcttagaggatattgttttaacattgaccttatttgaagatagggagatgattgaggaaagacttaaaacatatgctcacctctttgatgataaggtgatgaaacagcttaaacgtcgccgttatactggttggggacgtttgtctcgaaaattgattaatggtattagggataagcaatctggcaaaacaatattagattttttgaaatcagatggttttgccaatcgcaattttatgcagctgatccatgatgatagtttgacatttaaagaagacattcaaaaagcacaagtgtctggacaaggcgatagtttacatgaacatattgcaaatttagctggtagccctgctattaaaaaaggtattttacagactgtaaaagttgttgatgaattggtcaaagtaatggggcggcataagccagaaaatatcgttattgaaatggcacgtgaaaatcagacaactcaaaagggccagaaaaattcgcgagagcgtatgaaacgaatcgaagaaggtatcaaagaattaggaagtcagattcttaaagagcatcctgttgaaaatactcaattgcaaaatgaaaagctctatctctattatctccaaaatggaagagacatgtatgtggaccaagaattagatattaatcgtttaagtgattatgatgtcgatcacattgttccacaaagtttccttaaagacgattcaatagacaataaggtcttaacgcgttctgataaaaatcgtggtaaatcggataacgttccaagtgaagaagtagtcaaaaagatgaaaaactattggagacaacttctaaacgccaagttaatcactcaacgtaagtttgataatttaacgaaagctgaacgtggaggtttgagtgaacttgataaagctggttttatcaaacgccaattggttgaaactcgccaaatcactaagcatgtggcacaaattttggatagtcgcatgaatactaaatacgatgaaaatgataaacttattcgagaggttaaagtgattaccttaaaatctaaattagtttctgacttccgaaaagatttccaattctataaagtacgtgagattaacaattaccatcatgcccatgatgcgtatctaaatgccgtcgttggaactgctttgattaagaaatatccaaaacttgaatcggagtttgtctatggtgattataaagtttatgatgttcgtaaaatgattgctaagtctgagcaagaaataggcaaagcaaccgcaaaatatttcttttactctaatatcatgaacttcttcaaaacagaaattacacttgcaaatggagagattcgcaaacgccctctaatcgaaactaatggggaaactggagaaattgtctgggataaagggcgagattttgccacagtgcgcaaagtattgtccatgccccaagtcaatattgtcaagaaaacagaagtacagacaggcggattctccaaggagtcaattttaccaaaaagaaattcggacaagcttattgctcgtaaaaaagactgggatccaaaaaaatatggtggttttgatagtccaacggtagcttattcagtcctagtggttgctaaggtggaaaaagggaaatcgaagaagttaaaatccgttaaagagttactagggatcacaattatggaaagaagttcctttgaaaaaaatccgattgactttttagaagctaaaggatataaggaagttaaaaaagacttaatcattaaactacctaaatatagtctttttgagttagaaaacggtcgtaaacggatgctggctagtgccggagaattacaaaaaggaaatgagctggctctgccaagcaaatatgtgaattttttatatttagctagtcattatgaaaagttgaagggtagtccagaagataacgaacaaaaacaattgtttgtggagcagcataagcattatttagatgagattattgagcaaatcagtgaattttctaagcgtgttattttagcagatgccaatttagataaagttcttagtgcatataacaaacatagagacaaaccaatacgtgaacaagcagaaaatattattcatttatttacgttgacgaatcttggagctcccgctgcttttaaatattttgatacaacaattgatcgtaaacgatatacgtctacaaaagaagttttagatgccactcttatccatcaatccatcactggtctttatgaaacacgcattgatttgagtcagctaggaggtgactga

SEQ ID NO: 70 - protein, 1368 aa, Streptococcus pyogenes [sequence omitted]

SEQ ID NO: 71 - protein, 1378 aa, Lactobacillus fermentum
MKEYHIGLDIGTSSIGWAVTDSQFKLMRIKGKTAIGVRLFEEGKTAAERRTFRTTRRRLKRRKWRLHYLDEIFAPHLQEVDENFLRRLKQSNIHPEDPTKNQAFIGKLLFPDLLKKNERGYPTLIKMRDELPVEQRAHYPVMNIYKLREAMINEDRQFDLREVYLAVHHIVKYRGHFLNNASVDKFKVGRIDFDKSFNVLNEAYEELQNGEGSFTIEPSKVEKIGQLLLDTKMRKLDRQKAVAKLLEVKVADKEETKRNKQIATAMSKLVLGYKADFATVAMANGNEWKIDLSSETSEDEIEKFREELSDAQNDILTEITSLFSQIMLNEIVPNGMSISESMMDRYWTHERQLAEVKEYLATQPASARKEFDQVYNKYIGQAPKERGFDLEKGLKKILSKKENWKEIDELLKAGDFLPKQRTSANGVIPHQMHQQELDRIIEKQAKYYPWLATENPATGERDRHQAKYELDQLVSFRIPYYVGPLVTPEVQKATSGAKFAWAKRKEDGEITPWNLWDKIDRAESAEAFIKRMTVKDTYLLNEDVLPANSLLYQKYNVLNELNNVRVNGRRLSVGIKQDIYTELFKKKKTVKASDVASLVMAKTRGVNKPSVEGLSDPKKFNSNLATYLDLKSIVGDKVDDNRYQTDLENIIEWRSVFEDGEIFADKLTEVEWLTDEQRSALVKKRYKGWGRLSKKLLTGIVDENGQRIIDLMWNTDQNFKEIVDQPVFKEQIDQLNQKAITNDGMTLRERVESVLDDAYTSPQNKKAIWQVVRVVEDIVKAVGNAPKSISIEFARNEGNKGEITRSRRTQLQKLFEDQAHELVKDTSLTEELEKAPDLSDRYYFYFTQGGKDMYTGDPINFDEISTKYDIDHILPQSFVKDNSLDNRVLTSRKENNKKSDQVPAKLYAAKMKPYWNQLLKQGLITQRKFENLTKDVDQNIKYRSLGFVKRQLVETRQVIKLTANILGSMYQEAGTEIIETRAGLTKQLREEFDLPKVREVNDYHHAVDAYLTTFAGQYLNRRYPKLRSFFVYGEYMKFKHGSDLKLRNFNFFHELMEGDKSQGKVVDQQTGELITTRDEVAKSFDRLLNMKYMLVSKEVHDRSDQLYGATIVTAKESGKLTSPIEIKKNRLVDLYGAYTNGTSAFMTIIKFTGNKPKYKVIGIPTTSAASLKRAGKPGSESYNQELHRIIKSNPKVKKGFEIVVPHVSYGQLIVDGDCKFTLASPTVQHPATQLVLSKKSLETISSGYKILKDKPAIANERLIRVFDEVVGQMNRYFTIFDQRSNRQKVADARDKFLSLPTESKYEGAKKVQVGKTEVITNLLMGLHANATQGDLKVLGLATFGFFQSTTGLSLSEDTMIVYQSPTGLFERRICLKDI

SEQ ID NO: 72 - protein, 1368 aa, Staphylococcus aureus [sequence omitted]

SEQ ID NO: 73 - protein, 1053 aa, Staphylococcus aureus
MGKRNYILGLDIGITSVGYGIIDYETRDVIDAGVRLFKEANVENNEGRRSKRGARRLKRRRRHRIQRVKKLLFDYNLLTDHSELSGINPYEARVKGLSQKLSEEEFSAALLHLAKRRGVHNVNEVEEDTGNELSTKEQISRNSKALEEKYVAELQLERLKKDGEVRGSINRFKTSDYVKEAKQLLKVQKAYHQLDQSFIDTYIDLLETRRTYYEGPGEGSPFGWKDIKEWYEMLMGHCTYFPEELRSVKYAYNADLYNALNDLNNLVITRDENEKLEYYEKFQIIENVFKQKKKPTLKQIAKEILVNEEDIKGYRVTSTGKPEFTNLKVYHDIKDITARKEIIENAELLDQIAKILTIYQSSEDIQEELTNLNSELTQEEIEQISNLKGYTGTHNLSLKAINLILDELWHTNDNQIAIFNRLKLVPKKVDLSQQKEIPTTLVDDFILSPVVKRSFIQSIKVINAIIKKYGLPNDIIIELAREKNSKDAQKMINEMQKRNRQTNERIEEIIRTTGKENAKYLIEKIKLHDMQEGKCLYSLEAIPLEDLLNNPFNYEVDHIIPRSVSFDNSFNNKVLVKQEENSKKGNRTPFQYLSSSDSKISYETFKKHILNLAKGKGRISKTKKEYLLEERDINRFSVQKDFINRNLVDTRYATRGLMNLLRSYFRVNNLDVKVKSINGGFTSFLRRKWKFKKERNKGYKHHAEDALIIANADFIFKEWKKLDKAKKVMENQMFEEKQAESMPEIETEQEYKEIFITPHQIKHIKDFKDYKYSHRVDKKPNRKLINDTLYSTRKDDKGNTLIVNNLNGLYDKDNDKLKKLINKSPEKLLMYHHDPQTYQKLKLIMEQYGDEKNPLYKYYEETGNYLTKYSKKDNGPVIKKIKYYGNKLNAHLDITDDYPNSRNKVVKLSLKPYRFDVYLDNGVYKFVTVKNLDVIKKENYYEVNSKCYEEAKKLKKISNQAEFIASFYKNDLIKINGELYRVIGVNNDLLNRIEVNMIDITYREYLENMNDKRPPHIIKTIASKTQSIKKYSTDILGNLYEVKSKKHPQIIKK

SEQ ID NO: 74 - protein, 1409 aa, Streptococcus thermophilus
MLFNKCIIISINLDFSNKEKCMTKPYSIGLDIGTNSVGWAVITDNYKVPSKKMKVLGNTSKKYIKKNLLGVLLFDSGITAEGRRLKRTARRRYTRRRNRILYLQEIFSTEMATLDDAFFQRLDDSFLVPDDKRDSKYPIFGNLVEEKVYHDEFPTIYHLRKYLADSTKKADLRLVYLALAHMIKYRGHFLIEGEFNSKNNDIQKNFQDFLDTYNAIFESDLSLENSKQLEEIVKDKISKLEKKDRILKLFPGEKNSGIFSEFLKLIVGNQADFRKCFNLDEKASLHFSKESYDEDLETLLGYIGDDYSDVFLKAKKLYDAILLSGFLTVTDNETEAPLSSAMIKRYNEHKEDLALLKEYIRNISLKTYNEVFKDDTKNGYAGYIDGKTNQEDFYVYLKNLLAEFEGADYFLEKIDREDFLRKQRTFDNGSIPYQIHLQEMRAILDKQAKFYPFLAKNKERIEKILTFRIPYYVGPLARGNSDFAWSIRKRNEKITPWNFEDVIDKESSAEAFINRMTSFDLYLPEEKVLPKHSLLYETFNVYNELTKVRFIAESMRDYQFLDSKQKKDIVRLYFKDKRKVTDKDIIEYLHAIYGYDGIELKGIEKQFNSSLSTYHDLLNIINDKEFLDDSSNEAIIEEIIHTLTIFEDREMIKQRLSKFENIFDKSVLKKLSRRHYTGWGKLSAKLINGIRDEKSGNTILDYLIDDGISNRNFMQLIHDDALSFKKKIQKAQIIGDEDKGNIKEVVKSLPGSPAIKKGILQSIKIVDELVKVMGGRKPESIVVEMARENQYTNQGKSNSQQRLKRLEKSLKELGSKILKENIPAKLSKIDNNALQNDRLYLYYLQNGKDMYTGDDLDIDRLSNYDIDHIIPQAFLKDNSIDNKVLVSSASNRGKSDDFPSLEVVKKRKTFWYQLLKSKLISQRKFDNLTKAERGGLLPEDKAGFIQRQLVETRQITKHVARLLDEKFNNKKDENNRAVRTVKIITLKSTLVSQFRKDFELYKVREINDFHHAHDAYLNAVIASALLKKYPKLEPEFVYGDYPKYNSFRERKSATEKVYFYSNIMNIFKKSISLADGRVIERPLIEVNEETGESVWNKESDLATVRRVLSYPQVNVVKKVEEQNHGLDRGKPKGLFNANLSSKPKPNSNENLVGAKEYLDPKKYGGYAGISNSFAVLVKGTIEKGAKKKITNVLEFQGISILDRINYRKDKLNFLLEKGYKDIELIIELPKYSLFELSDGSRRMLASILSTNNKRGEIHKGNQIFLSQKFVKLLYHAKRISNTINENHRKYVENHKKEFEELFYYILEFNENYVGAKKNGKLLNSAFQSWQNHSIDELCSSFIGPTGSERKGLFELTSRGSAADFEFLGVKIPRYRDYTPSSLLKDATLIHQSVTGLYETRIDLAKLGEG

SEQ ID NO: 75 - protein, 1402 aa, Lactobacillus crispatus
MKIKNYNLALTPSTSAVGHVEVDDDLNILEPVHHQKAIGVAKFGEGETAEARRLARSARRTTKRRANRINHYFNEIMKPEIDKVDPLMFDRIKQAGLSPLDERKEFRTVIFDRPNIASYYHNQFPTIWHLQKYLMITDEKADIRLIYWALHSLLKHRGHFFNTTPMSQFKPGKLNLKDDMLALDDYNDLEGLSFAVANSPEIEKVIKDRSMHKKEKIAELKKLIVNDVPDKDLAKRNNKIITQIVNAIMGNSFHLNFIFDMDLDKLTSKAWSFKLDDPELDTKFDAISGSMTDNQIGIFETLQKIYSAISLLDILNGSSNVVDAKNALYDKHKRDLNLYFKFLNTLPDEIAKTLKAGYTLYIGNRKKDLLAARKLLKVNVAKNFSQDDFYKLINKELKSIDKQGLQTRFSEKVGELVAQNNFLPVQRSSDNVFIPYQLNAITFNKILENQGKYYDFLVKPNPAKKDRKNAPYELSQLMQFTIPYYVGPLVTPEEQVKSGIPKTSRFAWMVRKDNGAITPWNFYDKVDIEATADKFIKRSIAKDSYLLSELVLPKHSLLYEKYEVFNELSNVSLDGKKLSGGVKQILFNEVFKKTNKVNTSRILKALAKHNIPGSKITGLSNPEEFTSSLQTYNAWKKYFPNQIDNFAYQQDLEKMIEWSTVFEDHKILAKKLDEIEWLDDDQKKFVANTRLRGWGRLSKRLLTGLKDNYGKSIMQRLETTKANFQQIVYKPEFREQIDKISQAAAKNQSLEDILANSYTSPSNRKAIRKTMSVVDEYIKLNHGKEPDKIFLMFQRSEQEKGKQTEARSKQLNRILSQLKADKSANKLFSKQLADEFSNAIKKSKYKLNDKQYFYFQQLGRDALTGEVIDYDELYKYTVLHIIPRSKLTDDSQNNKVLTKYKIVDGSVALKFGNSYSDALGMPIKAFWTELNRLKLIPKGKLLNLTTDFSTLNKYQRDGYIARQLVETQQIVKLLATIMQSRFKHTKIIEVRNSQVANIRYQFDYFRIKNLNEYYRGFDAYLAAVVGTYLYKVYPKARRLFVYGQYLKPKKTNQENQDMHLDSEKKSQGFNFLWNLLYGKQDQIFVNGTDVIAFNRKDLITKMNTVYNYKSQKISLAIDYHNGAMFKATLFPRNDRDTAKTRKLIPKKKDYDTDIYGGYTSNVDGYMLLAEIIKRDGNKQYGFYGVPSRLVSELDTLKKTRYTEYEEKLKEIIKPELGVDLKKIKKIKILKNKVPFNQVIIDKGSKFFITSTSYRWNYRQLILSAESQQTLMDLVVDPDFSNHKARKDARKNADERLIKVYEEILYQVKNYMPMFVELHRCYEKLVDAQKTFKSLKISDKAMVLNQILILLHSNATSPVLEKLGYHTRFTLGKKHNLISENAVLVTQSITGLKENHVSIKQML

SEQ ID NO: 76 - protein, 1385 aa, Pedicoccus damnosus
MTNEKYSIGLDIGTSSIGFAVVNDNNRVIRVKGKNAIGVRLFDEGKAAADRRSFRTTRRSFRTTRRRLSRRRWRLKLLREIFDAYITPVDEAFFIRLKESNLSPKDSKKQYSGDILFNDRSDKDFYEKYPTIYHLRNALMTEHRKFDVREIYLAIHHIMKFRGHFLNATPANNFKVGRLNLEEKFEELNDIYQRVFPDESIEFRTDNLEQIKEVLLDNKRSRADRQRTLVSDIYQSSEDKDIEKRNKAVATEILKASLGNKAKLNVITNVEVDKEAAKEWSITFDSESIDDDLAKIEGQMTDDGHEIIEVLRSLYSGITLSAIVPENHTLSQSMVAKYDLHKDHLKLFKKLINGMTDTKKAKNLRAAYDGYIDGVKGKVLPQEDFYKQVQVNLDDSAEANEIQTYIDQDIFMPKQRTKANGSIPHQLQQQELDQIIENQKAYYPWLAELNPNPDKKRQQLAKYKLDELVTFRVPYYVGPMITAKDQKNQSGAEFAWMIRKEPGNITPWNFDQKVDRMATANQFIKRMTTTDTYLLGEDVLPAQSLLYQKFEVLNELNKIRIDHKPISIEQKQQIFNDLFKQFKNVTIKHLQDYLVSQGQYSKRPLIEGLADEKRFNSSLSTYSDLCGIFGAKLVEENDRQEDLEKIIEWSTIFEDKKIYRAKLNDLTWLTDDQKEKLATKRYQGWGRLSRKLLVGLKNSEHRNIMDILWITNENFMQIQAEPDFAKLVTDANKGMLEKTDSQDVINDLYTSPQNKKAIRQILLVVHDIQNAMHGQAPAKIHVEFARGEERNPRRSVQRQRQVEAAYEKVSNELVSAKVRQEFKEAINNKRDFKDRLFLYFMQGGIDIYTGKQLNIDQLSSYQIDHILPQAFVKDDSLTNRVLTNENQVKADSVPIDIFGKKMLSVWGRMKDQGLISKGKYRNLTMNPENISAHTENGFINRQLVETRQVIKLAVNILADEYGDSTQIISVKADLSHQMREDFELLKNRDVNDYHHAFDAYLAAFIGNYLLKRYPKLESYFVYGDFKKFTQKETKMRRFNFIYDLKHCDQVVNKETGEILWTKDEDIKYIRHLFAYKKILVSHEVREKRGALYNQTIYKAKDDKGSGQESKKLIRIKDDKETKIYGGYSGKSLAYMTIVQITKKNKVSYRVIGIPTLALARLNKLENDSTENNGELYKIIKPQFTHYKVDKKNGEIIETTDDFKIVVSKVRFQQLIDDAGQFFMLASDTYKNNAQQLVISNNALKAINNTNITDCPRDDLERLDNLRLDSAFDEIVKKMDKYFSAYDANNFREKIRNSNLIFYQLPVEDQWENNKITELGKRTVLTRILQGLHANATTTDMSIFKIKTPFGQLRQRSGISLSENAQLIYQSPTGLFERRVQLNKIK

SEQ ID NO: 77 - protein, 1367 aa, Fusobacterium nucleatum
MKKQKFSDYYLGFDIGTNSVGWCVTDLDYNVLRFNKKDMWGSRLFEEAKTAAERRVQRNSRRRLKRRKWRLNLLEEIFSNEILKIDSNFFRRLKESSLWLEDKSSKEKFTLFNDDNYKDYDFYKQYPTIFHLRNELIKNPEKKDIRLVYLAIHSIFKSRGHFLFEGQNLKEIKNFETLYNNLIAFLEDNGINKIIDKNNIEKLEKIVCDSKKGLKDKEKEFKEIFNSDKQLVAIFKLSVGSSVSLNDLFDTDEYKKGEVEKEKISFREQIYEDDKPIYYSILGEKIELLDIAKTFYDFMVLNNILADSQYISEAKVKLYEEHKKDLKNLKYIIRKYNKGNYDKLFKDKNENNYSAYIGLNKEKSKKEVIEKSRLKIDDLIKNIKGYLPKVEEIEEKDKAIFNKILNKIELKTILPKQRISDNGTLPYQIHEAELEKILENQSKYYDFLNYEENGIITKDKLLMTFKFRIPYYVGPLNSYHKDKGGNSWIVRKEEGKILPWNFEQKVDIEKSAEEFIKRMTNKCTYLNGEDVIPKDTFLYSEYVILNELNKVQVNDEFLNEENKRKIIDELFKENKKVSEKKFKEYLLVKQIVDGTIELKGVKDSFNSNYISYIRFKDIFGEKLNLDIYKEISEKSILWKCLYGDDKKIFEKKIKNEYGDILTKDEIKKINTFKFNNWGRLSEKLLTGIEFINLETGECYSSVMDALRRTNYNLMELLSSKFTLQESINNENKEMNEASYRDLIEESYVSPSLKRAIFQTLKIYEEIRKITGRVPKKVFIEMARGGDESMKNKKIPARQEQLKKLYDSCGNDIANFSIDIKEMKNSLISYDNNSLRQKKLYLYYLQFGKCMYTGREIDLDRLLQNNDTYDIDHIYPRSKVIKDDSFDNLVLVLKNENAEKSNEYPVKKEIQEKMKSFWRFLKEKNFISDEKYKRLTGKDDFELRGFMARQLVNVRQTTKEVGKILQQIEPEIKIVYSKAEIASSFREMFDFIKVRELNDTHHAKDAYLNIVAGNVYNTKFTEKPYRYLQEIKENYDVKKIYNYDIKNAWDKENSLEIVKKNMEKNTVNITRFIKEKKGQLFDLNPIKKGETSNEIISIKPKVYNGKDDKLNEKYGYYKSLNPAYFLYVEHKEKNKRIKSFERVNLVDVNNIKDEKSLVKYLIENKKLVEPRVIKKVYKRQVILINDYPYSIVTLDSNKLMDFENLKPLFLENKYEKILKNVIKFLEDNQGKSEENYKFIYLKKKDRYEKNETLESVKDRYNLEFNEMYDKFLEKLDSKDYKNYMNNKKYQELLDVKEKFIKLNLFDKAFTLKSFLDLFNRKTMADFSKVGLTKYLGKIQKISSNVLSKNELYLLEESVTGLFVKKIKL

SEQ ID NO: 78 - protein, 1286 aa, Enterococcus cecorum
RRKQRIQILQELLGEEVLKTDPGFFHRMKESRYVVEDKRTLDGKQVELPYALFVDKDYTDKEYYKQFPTINHLIVYLMTTSDTPDIRLVYLALHYYMKNRGNFLHSGDINNVKDINDILEQLDNVLETFLDGWNLKLKSYVEDIKNIYNRDLGRGERKKAFVNTLGAKTKAEKAFCSLISGGSTNLAELFDDSSLKEIETPKIEFASSSLEDKIDGIQEALEDRFAVIEAAKRLYDWKTLTDILGDSSSLAEARVNSYQMHHEQLLELKSLVKEYLDRKVFQEVFVSLNVANNYPAYIGHTKINGKKKELEVKRTKRNDFYSYVKKQVIEPIKKKVSDEAVLTKLSEIESLIEVDKYLPLQVNSDNGVIPYQVKLNELTRIFDNLENRIPVLRENRDKIIKTFKFRIPYYVGSLNGVVKNGKCTNWMVRKEEGKIYPWNFEDKVDLEASAEQFIRRMTNKCTYLVNEDVLPKYSLLYSKYLVLSELNNLRIDGRPLDVKIKQDIYENVFKKNRKVTLKKIKKYLLKEGIITDDDELSGLADDVKSSLTAYRDFKEKLGHLDLSEAQMENIILNITLFGDDKKLLKKRLAALYPFIDDKSLNRIATLNYRDWGRLSERFLSGITSVDQETGELRTIIQCMYETQANLMQLLAEPYHFVEAIEKENPKVDLESISYRIVNDLYVSPAVKRQIWQTLLVIKDIKQVMKHDPERIFIEMAREKQESKKTKSRKQVLSEVYKKAKEYEHLFEKLNSLTEEQLRSKKIYLYFTQLGKCMYSGEPIDFENLVSANSNYDIDHIYPQSKTIDDSFNNIVLVKKSLNAYKSNHYPIDKNIRDNEKVKTLWNTLVSKGLITKEKYERLIRSTPFSDEELAGFIARQLVETRQSTKAVAEILSNWFPESEIVYSKAKNVSNFRQDFEILKVRELNDCHHAHDAYLNIVVGNAYHTKFTNSPYRFIKNKANQEYNLRKLLQKVNKIESNGVVAWVGQSENNPGTIATVKKVIRRNTVLISRMVKEVDGQLFDLTLMKKGKGQVPIKSSDERLTDISKYGGYNKATGAYFTFVKSKKRGKVVRSFEYVPLHLSKQFENNNELLKEYIEKDRGLTDVEILIPKVLINSLFRYNGSLVRITGRGDTRLLLVHEQPLYVSNSFVQQLKSVSSYKLKKSENDNAKLTKTATEKLSNIDELYDGLLRKLDLPIYSYWFSSIKEYLVESRTKYIKLSIEEKALVIFEILHLFQSDAQVPNLKILGLSTKPSRIRIQKNLKDTDKMSIIHQSPSGIFEHEIELTSL

SEQ ID NO: 79 - protein, 1312 aa, Anaerostipes hadrus
MQNGFLGITVSSEQVGWAVTNPKYELERASRKDLWGVRLFDKAETAEDRRMFRTNRRLNQRKKNRIHYLRDIFHEEVNQKDPNFFQQLDESNFCEDDRTVEFNFDTNLYKNQFPTVYHLRKYLMETKDKPDIRLVYLAFSKFMKNRGHFLYKGNLGEVMDFENSMKGFCESLEKFNIDFPTLSDEQVKEVRDILCDHKIAKTVKKKNIITITKVKSKTAKAWIGLFCGCSVPVKVLFQDIDEEIVTDPEKISFEDASYDDYIANIEKGVGIYYEAIVSAKMLFDWSILNEILGDHQLLSDAMIAEYNKHHDDLKRLQKIIKGTGSRELYQDIFINDVSGNYVCYVGHAKTMSSADQKQFYTFLKNRLKNVNGISSEDAEWIDTEIKNGTLLPKQTKRDNSVIPHQLQLREFELILDNMQEMYPFLKENREKLLKIFNFVIPYYVGPLKGVVRKGESTNWMVPKKDGVIHPWNFDEMVDKEASAECFISRMTGNCSYLFNEKVLPKNSLLYETFEVLNELNPLKINGEPISVELKQRIYEQLFLTGKKVTKKSLTKYLIKNGYDKDIELSGIDNEFHSNLKSHIDFEDYDNLSDEEVEQIILRITVFEDKQLLKDYLNREFVKLSEDERKQICSLSYKGWGNLSEMLLNGITVTDSNGVEVSVMDMLWNTNLNLMQILSKKYGYKAEIEHYNKEHEKTIYNREDLMDYLNIPPAQRRKVNQLITIVKSLKKTYGVPNKIFFKISREHQDDPKRTSSRKEQLKYLYKSLKSEDEKHLMKELDELNDHELSNDKVYLYFLQKGRCIYSGKKLNLSRLRKSNYQNDIDYIYPLSAVNDRSMNNKVLTGIQENRADKYTYFPVDSEIQKKMKGFWMELVLQGFMTKEKYFRLSRENDFSKSELVSFIEREISDNQQSGRMIASVLQYYFPESKIVFVKEKLISSFKRDFHLISSYGHNHLQAAKDAYITIVVGNVYHTKFTMDPAIYFKNHKRKDYDLNRLFLENISRDGQIAWESGPYGSIQTVRKEYAQNHIAVTKRVVEVKGGLFKQMPLKKGHGEYPLKTNDPRFGNIAQYGGYTNVTGSYFVLVESMEKGKKRISLEYVPVYLHERLEDDPGHKLLKEYLVDHRKLNHPKILLAKVRKNSLLKIDGFYYRLNGRSGNALILTNAVELIMDDWQTKTANKISGYMKRRAIDKKARVYQNEFHIQELEQLYDFYLDKLKNGVYKNRKNNQAELIHNEKEQFMELKTEDQCVLLTEIKKLFVCSPMQADLTLIGGSKHTGMIAMSSNVTKADFAVIAEDPLGLRNKVIYSHKGEK

SEQ ID NO: 80 - protein, 1344 aa, Kandleria vitulina
MSQNNNKIYNIGLDIGDASVGWAVVDEHYNLLKRHGKHMWGSRLFTQANTAVERRSSRSTRRRYNKRRERIRLLREIMEDMVLDVDPTFFIRLANVSFLDQEDKKDYLKENYHSNYNLFIDKDFNDKTYYDKYPTIYHLRKHLCESKEKEDPRLIYLALHHIVKYRGNFLYEGQKFSMDVSNIEDKMIDVLRQFNEINLFEYVEDRKKIDEVLNVLKEPLSKKHKAEKAFALFDTTKDNKAAYKELCAALAGNKFNVTKMLKEAELHDEDEKDISFKFSDATFDDAFVEKQPLLGDCVEFIDLLHDIYSWVELQNILGSAHTSEPSISAAMIQRYEDHKNDLKLLKDVIRKYLPKKYFEVFRDEKSKKNNYCNYINHPSKTPVDEFYKYIKKLIEKIDDPDVKTILNKIELESFMLKQNSRTNGAVPYQMQLDELNKILENQSVYYSDLKDNEDKIRSILTFRIPYYFGPLNITKDRQFDWIIKKEGKENERILPWNANEIVDVDKTADEFIKRMRNFCTYFPDEPVMAKNSLTVSKYEVLNEINKLRINDHLIKRDMKDKMLHTLFMDHKSISANAMKKWLVKNQYFSNTDDIKIEGFQKENACSTSLTPWIDFTKIFGKINESNYDFIEKIIYDVTVFEDKKILRRRLKKEYDLDEEKIKKILKLKYSGWSRLSKKLLSGIKTKYKDSTRTPETVLEVMERTNMNLMQVINDEKLGFKKTIDDANSTSVSGKFSYAEVQELAGSPAIKRGIWQALLIVDEIKKIMKHEPAHVYIEFARNEDEKERKDSFVNQMLKLYKDYDFEDETEKEANKHLKGEDAKSKIRSERLKLYYTQMGKCMYTGKSLDIDRLDTYQVDHIVPQSLLKDDSIDNKVLVLSSENQRKLDDLVIPSSIRNKMYGFWEKLFNNKIISPKKFYSLIKTEFNEKDQERFINRQIVETRQITKHVAQIIDNHYENTKVVTVRADLSHQFRERYHIYKNRDINDFHHAHDAYIATILGTYIGHRFESLDAKYIYGEYKRIFRNQKNKGKEMKKNNDGFILNSMRNIYADKDTGEIVWDPNYIDRIKKCFYYKDCFVTKKLEENNGTFFNVTVLPNDTNSDKDNTLATVPVNKYRSNVNKYGGFSGVNSFIVAIKGKKKKGKKVIEVNKLTGIPLMYKNADEEIKINYLKQAEDLEEVQIGKEILKNQLIEKDGGLYYIVAPTEIINAKQLILNESQTKLVCEIYKAMKYKNYDNLDSEKIIDLYRLLINKMELYYPEYRKQLVKKFEDRYEQLKVISIEEKCNIIKQILATLHCNSSIGKIMYSDFKISTTIGRLNGRTISLDDISFIAESPTGMYSKKYKL

SEQ ID NO: 81 - protein, 1288 aa, Enterococcus faecalis
MRLFEEGHTAEDRRLKRTARRRISRRRNRLRYLQAFFEEAMTDLDENFFARLQESFLVPEDKKWHRHPIFAKLEDEVAYHETYPTIYHLRKKLADSSEQADLRLIYLALAHIVKYRGHFLIEGKLSTENTSVKDQFQQFMVIYNQTFVNGESRLVSAPLPESVLIEEELTEKASRTKKSEKVLQQFPQEKANGLFGQFLKLMVGNKADFKKVFGLEEEAKITYASESYEEDLEGILAKVGDEYSDVFLAAKNVYDAVELSTILADSDKKSHAKLSSSMIVRFTEHQEDLKKFKRFIRENCPDEYDNLFKNEQKDGYAGYIAHAGKVSQLKFYQYVKKIIQDIAGAEYFLEKIAQENFLRKQRTFDNGVIPHQIHLAELQAIIHRQAAYYPFLKENQEKIEQLVTFRIPYYVGPLSKGDASTFAWLKRQSEEPIRPWNLQETVDLDQSATAFIERMTNFDTYLPSEKVLPKHSLLYEKFMVFNELTKISYTDDRGIKANFSGKEKEKIFDYLFKTRRKVKKKDIIQFYRNEYNTEIVTLSGLEEDQFNASFSTYQDLLKCGLTRAELDHPDNAEKLEDIIKILTIFEDRQRIRTQLSTFKGQFSAEVLKKLERKHYTGWGRLSKKLINGIYDKESGKTILDYLVKDDGVSKHYNRNFMQLINDSQLSFKNAIQKAQSSEHEETLSETVNELAGSPAIKKGIYQSLKIVDELVAIMGYAPKRIVVEMARENQTTSTGKRRSIQRLKIVEKAMAEIGSNLLKEQPTTNEQLRDTRLFLYYMQNGKDMYTGDELSLHRLSHYDIDHIIPQSFMKDDSLDNLVLVGSTENRGKSDDVPSKEVVKDMKAYWEKLYAAGLISQRKFQRLTKGEQGGLTLEDKAHFIQRQLVETRQITKNVAGILDQRYNAKSKEKKVQIITLKASLTSQFRSIFGLYKVREVNDYHHGQDAYLNCVVATTLLKVYPNLAPEFVYGEYPKFQTFKENKATAKAIIYTNLLRFFTEDEPRFTKDGEILWSNSYLKTIKKELNYHQMNIVKKVEVQKGGFSKESIKPKGPSNKLIPVKNGLDPQKYGGFDSPVVAYTVLFTHEKGKKPLIKQEILGITIMEKTRFEQNPILFLEEKGFLRPRVLMKLPKYTLYEFPEGRRRLLASAKEAQKGNQMVLPEHLLTLLYHAKQCLLPNQSESLAYVEQHQPEFQEILERVVDFAEVHTLAKSKVQQIVKLFEANQTADVKEIAASFIQLMQFNAMGAPSTFKFFQKDIERARYTSIKEIFDATIIYQSPTGLYETRRKVVD

SEQ ID NO: 82 - protein, 1052 aa, Staphylococcus aureus
KRNYILGLDIGITSVGYGIIDYETRDVIDAGVRLFKEANVENNEGRRSKRGARRLKRRRRHRIQRVKKLLFDYNLLTDHSELSGINPYEARVKGLSQKLSEEEFSAALLHLAKRRGVHNVNEVEEDTGNELSTKEQISRNSKALEEKYVAELQLERLKKDGEVRGSINRFKTSDYVKEAKQLLKVQKAYHQLDQSFIDTYIDLLETRRTYYEGPGEGSPFGWKDIKEWYEMLMGHCTYFPEELRSVKYAYNADLYNALNDLNNLVITRDENEKLEYYEKFQIIENVFKQKKKPTLKQIAKEILVNEEDIKGYRVTSTGKPEFTNLKVYHDIKDITARKEIIENAELLDQIAKILTIYQSSEDIQEELTNLNSELTQEEIEQISNLKGYTGTHNLSLKAINLILDELWHTNDNQIAIFNRLKLVPKKVDLSQQKEIPTTLVDDFILSPVVKRSFIQSIKVINAIIKKYGLPNDIIIELAREKNSKDAQKMINEMQKRNRQTNERIEEIIRTTGKENAKYLIEKIKLHDMQEGKCLYSLEAIPLEDLLNNPFNYEVDHIIPRSVSFDNSFNNKVLVKQEENSKKGNRTPFQYLSSSDSKISYETFKKHILNLAKGKGRISKTKKEYLLEERDINRFSVQKDFINRNLVDTRYATRGLMNLLRSYFRVNNLDVKVKSINGGFTSFLRRKWKFKKERNKGYKHHAEDALIIANADFIFKEWKKLDKAKKVMENQMFEEKQAESMPEIETEQEYKEIFITPHQIKHIKDFKDYKYSHRVDKKPNRELINDTLYSTRKDDKGNTLIVNNLNGLYDKDNDKLKKLINKSPEKLLMYHHDPQTYQKLKLIMEQYGDEKNPLYKYYEETGNYLTKYSKKDNGPVIKKIKYYGNKLNAHLDITDDYPNSRNKVVKLSLKPYRFDVYLDNGVYKFVTVKNLDVIKKENYYEVNSKCYEEAKKLKKISNQAEFIASFYNNDLIKINGELYRVIGVNNDLLNRIEVNMIDITYREYLENMNDKRPPRIIKTIASKTQSIKKYSTDILGNLYEVKSKKHPQIIKKG

SEQ ID NO: 83 - protein, 1082 aa, Geobacillus thermodenitrificans
MKYKIGLDIGITSIGWAVINLDIPRIEDLGVRIFDRAENPKTGESLALPRRLARSARRRLRRRKHRLERIRRLFVREGILTKEELNKLFEKKHEIDVWQLRVEALDRKLNNDELARILLHLAKRRGFRSNRKSERTNKENSTMLKHIEENQSILSSYRTVAEMVVKDPKFSLHKRNKEDNYTNTVARDDLEREIKLIFAKQREYGNIVCTEAFEHEYISIWASQRPFASKDDIEKKVGFCTFEPKEKRAPKATYTFQSFTVWEHINKLRLVSPGGIRALTDDERRLIYKQAFHKNKITFHDVRTLLNLPDDTRFKGLLYDRNTTLKENEKVRFLELGAYHKIRKAIDSVYGKGAAKSFRPIDFDTFGYALTMFKDDTDIRSYLRNEYEQNGKRMENLADKVYDEELIEELLNLSFSKFGHLSLKALRNILPYMEQGEVYSTACERAGYTFTGPKKKQKTVLLPNIPPIANPVVMRALTQARKVVNAIIKKYGSPVSIHIELARELSQSFDERRKMQKEQEGNRKKNETAIRQLVEYGLTLNPTGLDIVKFKLWSEQNGKCAYSLQPIEIERLLEPGYTEVDHVIPYSRSLDDSYTNKVLVLTKENREKGNRTPAEYLGLGSERWQQFETFVLTNKQFSKKKRDRLLRLHYDENEENEFKNRNLNDTRYISRFLANFIREHLKFADSDDKQKVYTVNGRITAHLRSRWNFNKNREESNLHHAVDAAIVACTTPSDIARVTAFYQRREQNKELSKKTDPQFPQPWPHFADELQARLSKNPKESIKALNLGNYDNEKLESLQPVFVSRMPKRSITGAAHQETLRRYIGIDERSGKIQTVVKKKLSEIQLDKTGHFPMYGKESDPRTYEAIRQRLLEHNNDPKKAFQEPLYKPKKNGELGPIIRTIKIIDTTNQVIPLNDGKTVAYNSNIVRVDVFEKDGKYYCVPIYTIDMMKGILPNKAIEPNKPYSEWKEMTEDYTFRFSLYPNDLIRIEFPREKTIKTAVGEEIKIKDLFAYYQTIDSSNGGLSLVSHDNNFSLRSIGSRTLKRFEKYQVDVLGNIYKVRGEKRVGVASSSHSKAGETIRPL

SEQ ID NO: 84 - protein, 1375 aa, S. Canis
MEKKYSIGLDIGTNSVGWAVITDDYKVPSKKFKVLGNTNRKSIKKNLMGALLFDSGETAEATRLKRTARRRYTRRKNRIRYLQEIFANEMAKLDDSFFQRLEESFLVEEDKKNERHPIFGNLADEVAYHRNYPTIYHLRKKLADSPEKADLRLIYLALAHIIKFRGHFLIEGKLNAENSDVAKLFYQLIQTYNQLFEESPLDEIEVDAKGILSARLSKSKRLEKLIAVFPNEKKNGLFGNIIALALGLTPNFKSNFDLTEDAKLQLSKDTYDDDLDELLGQIGDQYADLFSAAKNLSDAILLSDILRSNSEVTKAPLSASMVKRYDEHHQDLALLKTLVRQQFPEKYAEIFKDDTKNGYAGYVGIGIKHRKRTTKLATQEEFYKFIKPILEKMDGAEELLAKLNRDDLLRKQRTFDNGSIPHQIHLKELHAILRRQEEFYPFLKENREKIEKILTFRIPYYVGPLARGNSRFAWLTRKSEEAITPWNFEEVVDKGASAQSFIERMTNFDEQLPNKKVLPKHSLLYEYFTVYNELTKVKYVTERMRKPEFLSGEQKKAIVDLLFKTNRKVTVKQLKEDYFKKIECFDSVEIIGVEDRFNASLGTYHDLLKIIKDKDFLDNEENEDILEDIVLTLTLFEDREMIEERLKTYAHLFDDKVMKQLKRRHYTGWGRLSRKMINGIRDKQSGKTILDFLKSDGFSNRNFMQLIHDDSLTFKEEIEKAQVSGQGDSLHEQIADLAGSPAIKKGILQTVKIVDELVKVMGHKPENIVIEMARENQTTTKGLQQSRERKKRIEEGIKELESQILKENPVENTQLQNEKLYLYYLQNGRDMYVDQELDINRLSDYDVDHIVPQSFIKDDSIDNKVLTRSVENRGKSDNVPSEEVVKKMKNYWRQLLNAKLITQRKFDNLTKAERGGLSEADKAGFIKRQLVETRQITKHVARILDSRMNTKRDKNDKPIREVKVITLKSKLVSDFRKDFQLYKVRDINNYHHAHDAYLNAVVGTALIKKYPKLESEFVYGDYKVYDVRKMIAKSEQEIGKATAKRFFYSNIMNFFKTEVKLANGEIRKRPLIETNGETGEVVWNKEKDFATVRKVLAMPQVNIVKKTEVQTGGFSKESILSKRESAKLIPRKKGWDTRKYGGFGSPTVAYSILVVAKVEKGKAKKLKSVKVLVGITIMEKGSYEKDPIGFLEAKGYKDIKKELIFKLPKYSLFELENGRRRMLASATELQKANELVLPQHLVRLLYYTQNISATTGSNNLGYIEQHREEFKEIFEKIIDFSEKYILKNKVNSNLKSSFDEQFAVSDSILLSNSFVSLLKYTSFGASGGFTFLDLDVKQGRLRYQTVTEVLDATLIYQSITGLYETRTDLSQLGGD

SEQ ID NO: 85 - protein, 1368 aa, Streptococcus pyogenes
  misc_feature (10)..(10): Xaa can be any naturally occurring amino acid
  misc_feature (840)..(840): Xaa can be any naturally occurring amino acid
MDKKYSIGLXIGTNSVGWAVITDEYKVPSKKFKVLGNTDRHSIKKNLIGALLFDSGETAEATRLKRTARRRYTRRKNRICYLQEIFSNEMAKVDDSFFHRLEESFLVEEDKKHERHPIFGNIVDEVAYHEKYPTIYHLRKKLVDSTDKADLRLIYLALAHMIKFRGHFLIEGDLNPDNSDVDKLFIQLVQTYNQLFEENPINASGVDAKAILSARLSKSRRLENLIAQLPGEKKNGLFGNLIALSLGLTPNFKSNFDLAEDAKLQLSKDTYDDDLDNLLAQIGDQYADLFLAAKNLSDAILLSDILRVNTEITKAPLSASMIKRYDEHHQDLTLLKALVRQQLPEKYKEIFFDQSKNGYAGYIDGGASQEEFYKFIKPILEKMDGTEELLVKLNREDLLRKQRTFDNGSIPHQIHLGELHAILRRQEDFYPFLKDNREKIEKILTFRIPYYVGPLARGNSRFAWMTRKSEETITPWNFEEVVDKGASAQSFIERMTNFDKNLPNEKVLPKHSLLYEYFTVYNELTKVKYVTEGMRKPAFLSGEQKKAIVDLLFKTNRKVTVKQLKEDYFKKIECFDSVEISGVEDRFNASLGTYHDLLKIIKDKDFLDNEENEDILEDIVLTLTLFEDREMIEERLKTYAHLFDDKVMKQLKRRRYTGWGRLSRKLINGIRDKQSGKTILDFLKSDGFANRNFMQLIHDDSLTFKEDIQKAQVSGQGDSLHEHIANLAGSPAIKKGILQTVKVVDELVKVMGRHKPENIVIEMARENQTTQKGQKNSRERMKRIEEGIKELGSQILKEHPVENTQLQNEKLYLYYLQNGRDMYVDQELDINRLSDYDVDXIVPQSFLKDDSIDNKVLTRSDKNRGKSDNVPSEEVVKKMKNYWRQLLNAKLITQRKFDNLTKAERGGLSELDKAGFIKRQLVETRQITKHVAQILDSRMNTKYDENDKLIREVKVITLKSKLVSDFRKDFQFYKVREINNYHHAHDAYLNAVVGTALIKKYPKLESEFVYGDYKVYDVRKMIAKSEQEIGKATAKYFFYSNIMNFFKTEITLANGEIRKRPLIETNGETGEIVWDKGRDFATVRKVLSMPQVNIVKKTEVQTGGFSKESILPKRNSDKLIARKKDWDPKKYGGFDSPTVAYSVLVVAKVEKGKSKKLKSVKELLGITIMERSSFEKNPIDFLEAKGYKEVKKDLIIKLPKYSLFELENGRKRMLASAGELQKGNELALPSKYVNFLYLASHYEKLKGSPEDNEQKQLFVEQHKHYLDEIIEQISEFSKRVILADANLDKVLSAYNKHRDKPIREQAENIIHLFTLTNLGAPAAFKYFDTTIDRKRYTSTKEVLDATLIHQSITGLYETRIDLSQLGGD

SEQ ID NO: 86 - protein, 1368 aa, Streptococcus pyogenes
MDKKYSIGLAIGTNSVGWAVITDEYKVPSKKFKVLGNTDRHSIKKNLIGALLFDSGETAEATRLKRTARRRYTRRKNRICYLQEIFSNEMAKVDDSFFHRLEESFLVEEDKKHERHPIFGNIVDEVAYHEKYPTIYHLRKKLVDSTDKADLRLIYLALAHMIKFRGHFLIEGDLNPDNSDVDKLFIQLVQTYNQLFEENPINASGVDAKAILSARLSKSRRLENLIAQLPGEKKNGLFGNLIALSLGLTPNFKSNFDLAEDAKLQLSKDTYDDDLDNLLAQIGDQYADLFLAAKNLSDAILLSDILRVNTEITKAPLSASMIKRYDEHHQDLTLLKALVRQQLPEKYKEIFFDQSKNGYAGYIDGGASQEEFYKFIKPILEKMDGTEELLVKLNREDLLRKQRTFDNGSIPHQIHLGELHAILRRQEDFYPFLKDNREKIEKILTFRIPYYVGPLARGNSRFAWMTRKSEETITPWNFEEVVDKGASAQSFIERMTNFDKNLPNEKVLPKHSLLYEYFTVYNELTKVKYVTEGMRKPAFLSGEQKKAIVDLLFKTNRKVTVKQLKEDYFKKIECFDSVEISGVEDRFNASLGTYHDLLKIIKDKDFLDNEENEDILEDIVLTLTLFEDREMIEERLKTYAHLFDDKVMKQLKRRRYTGWGRLSRKLINGIRDKQSGKTILDFLKSDGFANRNFMQLIHDDSLTFKEDIQKAQVSGQGDSLHEHIANLAGSPAIKKGILQTVKVVDELVKVMGRHKPENIVIEMARENQTTQKGQKNSRERMKRIEEGIKELGSQILKEHPVENTQLQNEKLYLYYLQNGRDMYVDQELDINRLSDYDVDAIVPQSFLKDDSIDNKVLTRSDKNRGKSDNVPSEEVVKKMKNYWRQLLNAKLITQRKFDNLTKAERGGLSELDKAGFIKRQLVETRQITKHVAQILDSRMNTKYDENDKLIREVKVITLKSKLVSDFRKDFQFYKVREINNYHHAHDAYLNAVVGTALIKKYPKLESEFVYGDYKVYDVRKMIAKSEQEIGKATAKYFFYSNIMNFFKTEITLANGEIRKRPLIETNGETGEIVWDKGRDFATVRKVLSMPQVNIVKKTEVQTGGFSKESILPKRNSDKLIARKKDWDPKKYGGFDSPTVAYSVLVVAKVEKGKSKKLKSVKELLGITIMERSSFEKNPIDFLEAKGYKEVKKDLIIKLPKYSLFELENGRKRMLASAGELQKGNELALPSKYVNFLYLASHYEKLKGSPEDNEQKQLFVEQHKHYLDEIIEQISEFSKRVILADANLDKVLSAYNKHRDKPIREQAENIIHLFTLTNLGAPAAFKYFDTTIDRKRYTSTKEVLDATLIHQSITGLYETRIDLSQLGGD

SEQ ID NO: 87 - protein, 1227 aa, Lachnospiraceae bacterium
MSKLEKFTNCYSLSKTLRFKAIPVGKTQENIDNKRLLVEDEKRAEDYKGVKKLLDRYYLSFINDVLHSIKLKNLNNYISLFRKKTRTEKENKELENLEINLRKEIAKAFKGNEGYKSLFKKDIIETILPEFLDDKDEIALVNSFNGFTTAFTGFFDNRENMFSEEAKSTSIAFRCINENLTRYISNMDIFEKVDAIFDKHEVQEIKEKILNSDYDVEDFFEGEFFNFVLTQEGIDVYNAIIGGFVTESGEKIKGLNEYINLYNQKTKQKLPKFKPLYKQVLSDRESLSFYGEGYTSDEEVLEVFRNTLNKNSEIFSSIKKLEKLFKNFDEYSSAGIFVKNGPAISTISKDIFGEWNVIRDKWNAEYDDIHLKKKAVVTEKYEDDRRKSFKKIGSFSLEQLQEYADADLSVVEKLKEIIIQKVDEIYKVYGSSEKLFDADFVLEKSLKKNDAVVAIMKDLLDSVKSFENYIKAFFGEGKETNRDESFYGDFVLAYDILLKVDHIYDAIRNYVTQKPYSKDKFKLYFQNPQFMGGWDKDKETDYRATILRYGSKYYLAIMDKKYAKCLQKIDKDDVNGNYEKINYKLLPGPNKMLPKVFFSKKWMAYYNPSEDIQKIYKNGTFKKGDMFNLNDCHKLIDFFKDSISRYPKWSNAYDFNFSETEKYKDIAGFYREVEEQGYKVSFESASKKEVDKLVEEGKLYMFQIYNKDFSDKSHGTPNLHTMYFKLLFDENNHGQIRLSGGAELFMRRASLKKEELVVHPANSPIANKNPDNPKKTTTLSYDVYKDKRFSEDQYELHIPIAINKCPKNIFKINTEVRVLLKHDDNPYVIGIARGERNLLYIVVVDGKGNIVEQYSLNEIINNFNGIRIKTDYHSLLDKKEKERFEARQNWTSIENIKELKAGYISQVVHKICELVEKYDAVIALEDLNSGFKNSRVKVEKQVYQKFEKMLIDKLNYMVDKKSNPCATGGALKGYQITNKFESFKSMSTQNGFIFYIPAWLTSKIDPSTGFVNLLKTKYTSIADSKKFISSFDRIMYVPEEDLFEFALDYKNFSRTDADYIKKWKLYSYGNRIRIFRNPKKNNVFDWEEVCLTSAYKELFNKYGINYQQGDIRALLCEQSDKAFYSSFMALMSLMLQMRNSITGRTDVDFLISPVKNSDGIFYDSRNYEAQENAILPKNADANGAYNIARKVLWAIGQFKKAEDEKLDKVKIAISNKEWLEYAQTSVK

SEQ ID NO: 88 - protein, 1368 aa, Streptococcus pyogenes
  misc_feature (10)..(10): Xaa can be any naturally occurring amino acid
MDKKYSIGLXIGTNSVGWAVITDEYKVPSKKFKVLGNTDRHSIKKNLIGALLFDSGETAEATRLKRTARRRYTRRKNRICYLQEIFSNEMAKVDDSFFHRLEESFLVEEDKKHERHPIFGNIVDEVAYHEKYPTIYHLRKKLVDSTDKADLRLIYLALAHMIKFRGHFLIEGDLNPDNSDVDKLFIQLVQTYNQLFEENPINASGVDAKAILSARLSKSRRLENLIAQLPGEKKNGLFGNLIALSLGLTPNFKSNFDLAEDAKLQLSKDTYDDDLDNLLAQIGDQYADLFLAAKNLSDAILLSDILRVNTEITKAPLSASMIKRYDEHHQDLTLLKALVRQQLPEKYKEIFFDQSKNGYAGYIDGGASQEEFYKFIKPILEKMDGTEELLVKLNREDLLRKQRTFDNGSIPHQIHLGELHAILRRQEDFYPFLKDNREKIEKILTFRIPYYVGPLARGNSRFAWMTRKSEETITPWNFEEVVDKGASAQSFIERMTNFDKNLPNEKVLPKHSLLYEYFTVYNELTKVKYVTEGMRKPAFLSGEQKKAIVDLLFKTNRKVTVKQLKEDYFKKIECFDSVEISGVEDRFNASLGTYHDLLKIIKDKDFLDNEENEDILEDIVLTLTLFEDREMIEERLKTYAHLFDDKVMKQLKRRRYTGWGRLSRKLINGIRDKQSGKTILDFLKSDGFANRNFMQLIHDDSLTFKEDIQKAQVSGQGDSLHEHIANLAGSPAIKKGILQTVKVVDELVKVMGRHKPENIVIEMARENQTTQKGQKNSRERMKRIEEGIKELGSQILKEHPVENTQLQNEKLYLYYLQNGRDMYVDQELDINRLSDYDVDHIVPQSFLKDDSIDNKVLTRSDKNRGKSDNVPSEEVVKKMKNYWRQLLNAKLITQRKFDNLTKAERGGLSELDKAGFIKRQLVETRQITKHVAQILDSRMNTKYDENDKLIREVKVITLKSKLVSDFRKDFQFYKVREINNYHHAHDAYLNAVVGTALIKKYPKLESEFVYGDYKVYDVRKMIAKSEQEIGKATAKYFFYSNIMNFFKTEITLANGEIRKRPLIETNGETGEIVWDKGRDFATVRKVLSMPQVNIVKKTEVQTGGFSKESILPKRNSDKLIARKKDWDPKKYGGFDSPTVAYSVLVVAKVEKGKSKKLKSVKELLGITIMERSSFEKNPIDFLEAKGYKEVKKDLIIKLPKYSLFELENGRKRMLASAGELQKGNELALPSKYVNFLYLASHYEKLKGSPEDNEQKQLFVEQHKHYLDEIIEQISEFSKRVILADANLDKVLSAYNKHRDKPIREQAENIIHLFTLTNLGAPAAFKYFDTTIDRKRYTSTKEVLDATLIHQSITGLYETRIDLSQLGGD

SEQ ID NO: 89 - protein, 1368 aa, Streptococcus pyogenes
  misc_feature (762)..(762): Xaa can be any naturally occurring amino acid
MDKKYSIGLDIGTNSVGWAVITDEYKVPSKKFKVLGNTDRHSIKKNLIGALLFDSGETAEATRLKRTARRRYTRRKNRICYLQEIFSNEMAKVDDSFFHRLEESFLVEEDKKHERHPIFGNIVDEVAYHEKYPTIYHLRKKLVDSTDKADLRLIYLALAHMIKFRGHFLIEGDLNPDNSDVDKLFIQLVQTYNQLFEENPINASGVDAKAILSARLSKSRRLENLIAQLPGEKKNGLFGNLIALSLGLTPNFKSNFDLAEDAKLQLSKDTYDDDLDNLLAQIGDQYADLFLAAKNLSDAILLSDILRVNTEITKAPLSASMIKRYDEHHQDLTLLKALVRQQLPEKYKEIFFDQSKNGYAGYIDGGASQEEFYKFIKPILEKMDGTEELLVKLNREDLLRKQRTFDNGSIPHQIHLGELHAILRRQEDFYPFLKDNREKIEKILTFRIPYYVGPLARGNSRFAWMTRKSEETITPWNFEEVVDKGASAQSFIERMTNFDKNLPNEKVLPKHSLLYEYFTVYNELTKVKYVTEGMRKPAFLSGEQKKAIVDLLFKTNRKVTVKQLKEDYFKKIECFDSVEISGVEDRFNASLGTYHDLLKIIKDKDFLDNEENEDILEDIVLTLTLFEDREMIEERLKTYAHLFDDKVMKQLKRRRYTGWGRLSRKLINGIRDKQSGKTILDFLKSDGFANRNFMQLIHDDSLTFKEDIQKAQVSGQGDSLHEHIANLAGSPAIKKGILQTVKVVDELVKVMGRHKPENIVIXMARENQTTQKGQKNSRERMKRIEEGIKELGSQILKEHPVENTQLQNEKLYLYYLQNGRDMYVDQELDINRLSDYDVDHIVPQSFLKDDSIDNKVLTRSDKNRGKSDNVPSEEVVKKMKNYWRQLLNAKLITQRKFDNLTKAERGGLSELDKAGFIKRQLVETRQITKHVAQILDSRMNTKYDENDKLIREVKVITLKSKLVSDFRKDFQFYKVREINNYHHAHDAYLNAVVGTALIKKYPKLESEFVYGDYKVYDVRKMIAKSEQEIGKATAKYFFYSNIMNFFKTEITLANGEIRKRPLIETNGETGEIVWDKGRDFATVRKVLSMPQVNIVKKTEVQTGGFSKESILPKRNSDKLIARKKDWDPKKYGGFDSPTVAYSVLVVAKVEKGKSKKLKSVKELLGITIMERSSFEKNPIDFLEAKGYKEVKKDLIIKLPKYSLFELENGRKRMLASAGELQKGNELALPSKYVNFLYLASHYEKLKGSPEDNEQKQLFVEQHKHYLDEIIEQISEFSKRVILADANLDKVLSAYNKHRDKPIREQAENIIHLFTLTNLGAPAAFKYFDTTIDRKRYTSTKEVLDATLIHQSITGLYETRIDLSQLGGD

SEQ ID NO: 90 - protein, 1368 aa, Streptococcus pyogenes
  misc_feature (983)..(983): Xaa can be any naturally occurring amino acid
MDKKYSIGLDIGTNSVGWAVITDEYKVPSKKFKVLGNTDRHSIKKNLIGALLFDSGETAEATRLKRTARRRYTRRKNRICYLQEIFSNEMAKVDDSFFHRLEESFLVEEDKKHERHPIFGNIVDEVAYHEKYPTIYHLRKKLVDSTDKADLRLIYLALAHMIKFRGHFLIEGDLNPDNSDVDKLFIQLVQTYNQLFEENPINASGVDAKAILSARLSKSRRLENLIAQLPGEKKNGLFGNLIALSLGLTPNFKSNFDLAEDAKLQLSKDTYDDDLDNLLAQIGDQYADLFLAAKNLSDAILLSDILRVNTEITKAPLSASMIKRYDEHHQDLTLLKALVRQQLPEKYKEIFFDQSKNGYAGYIDGGASQEEFYKFIKPILEKMDGTEELLVKLNREDLLRKQRTFDNGSIPHQIHLGELHAILRRQEDFYPFLKDNREKIEKILTFRIPYYVGPLARGNSRFAWMTRKSEETITPWNFEEVVDKGASAQSFIERMTNFDKNLPNEKVLPKHSLLYEYFTVYNELTKVKYVTEGMRKPAFLSGEQKKAIVDLLFKTNRKVTVKQLKEDYFKKIECFDSVEISGVEDRFNASLGTYHDLLKIIKDKDFLDNEENEDILEDIVLTLTLFEDREMIEERLKTYAHLFDDKVMKQLKRRRYTGWGRLSRKLINGIRDKQSGKTILDFLKSDGFANRNFMQLIHDDSLTFKEDIQKAQVSGQGDSLHEHIANLAGSPAIKKGILQTVKVVDELVKVMGRHKPENIVIEMARENQTTQKGQKNSRERMKRIEEGIKELGSQILKEHPVENTQLQNEKLYLYYLQNGRDMYVDQELDINRLSDYDVDHIVPQSFLKDDSIDNKVLTRSDKNRGKSDNVPSEEVVKKMKNYWRQLLNAKLITQRKFDNLTKAERGGLSELDKAGFIKRQLVETRQITKHVAQILDSRMNTKYDENDKLIREVKVITLKSKLVSDFRKDFQFYKVREINNYHXAHDAYLNAVVGTALIKKYPKLESEFVYGDYKVYDVRKMIAKSEQEIGKATAKYFFYSNIMNFFKTEITLANGEIRKRPLIETNGETGEIVWDKGRDFATVRKVLSMPQVNIVKKTEVQTGGFSKESILPKRNSDKLIARKKDWDPKKYGGFDSPTVAYSVLVVAKVEKGKSKKLKSVKELLGITIMERSSFEKNPIDFLEAKGYKEVKKDLIIKLPKYSLFELENGRKRMLASAGELQKGNELALPSKYVNFLYLASHYEKLKGSPEDNEQKQLFVEQHKHYLDEIIEQISEFSKRVILADANLDKVLSAYNKHRDKPIREQAENIIHLFTLTNLGAPAAFKYFDTTIDRKRYTSTKEVLDATLIHQSITGLYETRIDLSQLGGD

SEQ ID NO: 91 - protein, 1368 aa, Streptococcus pyogenes
  misc_feature (986)..(986): Xaa can be any naturally occurring amino acid
MDKKYSIGLDIGTNSVGWAVITDEYKVPSKKFKVLGNTDRHSIKKNLIGALLFDSGETAEATRLKRTARRRYTRRKNRICYLQEIFSNEMAKVDDSFFHRLEESFLVEEDKKHERHPIFGNIVDEVAYHEKYPTIYHLRKKLVDSTDKADLRLIYLALAHMIKFRGHFLIEGDLNPDNSDVDKLFIQLVQTYNQLFEENPINASGVDAKAILSARLSKSRRLENLIAQLPGEKKNGLFGNLIALSLGLTPNFKSNFDLAEDAKLQLSKDTYDDDLDNLLAQIGDQYADLFLAAKNLSDAILLSDILRVNTEITKAPLSASMIKRYDEHHQDLTLLKALVRQQLPEKYKEIFFDQSKNGYAGYIDGGASQEEFYKFIKPILEKMDGTEELLVKLNREDLLRKQRTFDNGSIPHQIHLGELHAILRRQEDFYPFLKDNREKIEKILTFRIPYYVGPLARGNSRFAWMTRKSEETITPWNFEEVVDKGASAQSFIERMTNFDKNLPNEKVLPKHSLLYEYFTVYNELTKVKYVTEGMRKPAFLSGEQKKAIVDLLFKTNRKVTVKQLKEDYFKKIECFDSVEISGVEDRFNASLGTYHDLLKIIKDKDFLDNEENEDILEDIVLTLTLFEDREMIEERLKTYAHLFDDKVMKQLKRRRYTGWGRLSRKLINGIRDKQSGKTILDFLKSDGFANRNFMQLIHDDSLTFKEDIQKAQVSGQGDSLHEHIANLAGSPAIKKGILQTVKVVDELVKVMGRHKPENIVIEMARENQTTQKGQKNSRERMKRIEEGIKELGSQILKEHPVENTQLQNEKLYLYYLQNGRDMYVDQELDINRLSDYDVDHIVPQSFLKDDSIDNKVLTRSDKNRGKSDNVPSEEVVKKMKNYWRQLLNAKLITQRKFDNLTKAERGGLSELDKAGFIKRQLVETRQITKHVAQILDSRMNTKYDENDKLIREVKVITLKSKLVSDFRKDFQFYKVREINNYHHAHXAYLNAVVGTALIKKYPKLESEFVYGDYKVYDVRKMIAKSEQEIGKATAKYFFYSNIMNFFKTEITLANGEIRKRPLIETNGETGEIVWDKGRDFATVRKVLSMPQVNIVKKTEVQTGGFSKESILPKRNSDKLIARKKDWDPKKYGGFDSPTVAYSVLVVAKVEKGKSKKLKSVKELLGITIMERSSFEKNPIDFLEAKGYKEVKKDLIIKLPKYSLFELENGRKRMLASAGELQKGNELALPSKYVNFLYLASHYEKLKGSPEDNEQKQLFVEQHKHYLDEIIEQISEFSKRVILADANLDKVLSAYNKHRDKPIREQAENIIHLFTLTNLGAPAAFKYFDTTIDRKRYTSTKEVLDATLIHQSITGLYETRIDLSQLGGD

SEQ ID NO: 92 - protein, 1368 aa, Streptococcus pyogenes
MDKKYSIGLAIGTNSVGWAVITDEYKVPSKKFKVLGNTDRHSIKKNLIGALLFDSGETAEATRLKRTARRRYTRRKNRICYLQEIFSNEMAKVDDSFFHRLEESFLVEEDKKHERHPIFGNIVDEVAYHEKYPTIYHLRKKLVDSTDKADLRLIYLALAHMIKFRGHFLIEGDLNPDNSDVDKLFIQLVQTYNQLFEENPINASGVDAKAILSARLSKSRRLENLIAQLPGEKKNGLFGNLIALSLGLTPNFKSNFDLAEDAKLQLSKDTYDDDLDNLLAQIGDQYADLFLAAKNLSDAILLSDILRVNTEITKAPLSASMIKRYDEHHQDLTLLKALVRQQLPEKYKEIFFDQSKNGYAGYIDGGASQEEFYKFIKPILEKMDGTEELLVKLNREDLLRKQRTFDNGSIPHQIHLGELHAILRRQEDFYPFLKDNREKIEKILTFRIPYYVGPLARGNSRFAWMTRKSEETITPWNFEEVVDKGASAQSFIERMTNFDKNLPNEKVLPKHSLLYEYFTVYNELTKVKYVTEGMRKPAFLSGEQKKAIVDLLFKTNRKVTVKQLKEDYFKKIECFDSVEISGVEDRFNASLGTYHDLLKIIKDKDFLDNEENEDILEDIVLTLTLFEDREMIEERLKTYAHLFDDKVMKQLKRRRYTGWGRLSRKLINGIRDKQSGKTILDFLKSDGFANRNFMQLIHDDSLTFKEDIQKAQVSGQGDSLHEHIANLAGSPAIKKGILQTVKVVDELVKVMGRHKPENIVIEMARENQTTQKGQKNSRERMKRIEEGIKELGSQILKEHPVENTQLQNEKLYLYYLQNGRDMYVDQELDINRLSDYDVDHIVPQSFLKDDSIDNKVLTRSDKNRGKSDNVPSEEVVKKMKNYWRQLLNAKLITQRKFDNLTKAERGGLSELDKAGFIKRQLVETRQITKHVAQILDSRMNTKYDENDKLIREVKVITLKSKLVSDFRKDFQFYKVREINNYHHAHDAYLNAVVGTALIKKYPKLESEFVYGDYKVYDVRKMIAKSEQEIGKATAKYFFYSNIMNFFKTEITLANGEIRKRPLIETNGETGEIVWDKGRDFATVRKVLSMPQVNIVKKTEVQTGGFSKESILPKRNSDKLIARKKDWDPKKYGGFDSPTVAYSVLVVAKVEKGKSKKLKSVKELLGITIMERSSFEKNPIDFLEAKGYKEVKKDLIIKLPKYSLFELENGRKRMLASAGELQKGNELALPSKYVNFLYLASHYEKLKGSPEDNEQKQLFVEQHKHYLDEIIEQISEFSKRVILADANLDKVLSAYNKHRDKPIREQAENIIHLFTLTNLGAPAAFKYFDTTIDRKRYTSTKEVLDATLIHQSITGLYETRIDLSQLGGD

SEQ ID NO: 93 - protein, 1368 aa, Streptococcus pyogenes
MDKKYSIGLDIGTNSVGWAVITDEYKVPSKKFKVLGNTDRHSIKKNLIGALLFDSGETAEATRLKRTARRRYTRRKNRICYLQEIFSNEMAKVDDSFFHRLEESFLVEEDKKHERHPIFGNIVDEVAYHEKYPTIYHLRKKLVDSTDKADLRLIYLALAHMIKFRGHFLIEGDLNPDNSDVDKLFIQLVQTYNQLFEENPINASGVDAKAILSARLSKSRRLENLIAQLPGEKKNGLFGNLIALSLGLTPNFKSNFDLAEDAKLQLSKDTYDDDLDNLLAQIGDQYADLFLAAKNLSDAILLSDILRVNTEITKAPLSASMIKRYDEHHQDLTLLKALVRQQLPEKYKEIFFDQSKNGYAGYIDGGASQEEFYKFIKPILEKMDGTEELLVKLNREDLLRKQRTFDNGSIPHQIHLGELHAILRRQEDFYPFLKDNREKIEKILTFRIPYYVGPLARGNSRFAWMTRKSEETITPWNFEEVVDKGASAQSFIERMTNFDKNLPNEKVLPKHSLLYEYFTVYNELTKVKYVTEGMRKPAFLSGEQKKAIVDLLFKTNRKVTVKQLKEDYFKKIECFDSVEISGVEDRFNASLGTYHDLLKIIKDKDFLDNEENEDILEDIVLTLTLFEDREMIEERLKTYAHLFDDKVMKQLKRRRYTGWGRLSRKLINGIRDKQSGKTILDFLKSDGFANRNFMQLIHDDSLTFKEDIQKAQVSGQGDSLHEHIANLAGSPAIKKGILQTVKVVDELVKVMGRHKPENIVIAMARENQTTQKGQKNSRERMKRIEEGIKELGSQILKEHPVENTQLQNEKLYLYYLQNGRDMYVDQELDINRLSDYDVDHIVPQSFLKDDSIDNKVLTRSDKNRGKSDNVPSEEVVKKMKNYWRQLLNAKLITQRKFDNLTKAERGGLSELDKAGFIKRQLVETRQITKHVAQILDSRMNTKYDENDKLIREVKVITLKSKLVSDFRKDFQFYKVREINNYHHAHDAYLNAVVGTALIKKYPKLESEFVYGDYKVYDVRKMIAKSEQEIGKATAKYFFYSNIMNFFKTEITLANGEIRKRPLIETNGETGEIVWDKGRDFATVRKVLSMPQVNIVKKTEVQTGGFSKESILPKRNSDKLIARKKDWDPKKYGGFDSPTVAYSVLVVAKVEKGKSKKLKSVKELLGITIMERSSFEKNPIDFLEAKGYKEVKKDLIIKLPKYSLFELENGRKRMLASAGELQKGNELALPSKYVNFLYLASHYEKLKGSPEDNEQKQLFVEQHKHYLDEIIEQISEFSKRVILADANLDKVLSAYNKHRDKPIREQAENIIHLFTLTNLGAPAAFKYFDTTIDRKRYTSTKEVLDATLIHQSITGLYETRIDLSQLGGD

SEQ ID NO: 94 - protein, 1368 aa, Streptococcus pyogenes
MDKKYSIGLDIGTNSVGWAVITDEYKVPSKKFKVLGNTDRHSIKKNLIGALLFDSGETAEATRLKRTARRRYTRRKNRICYLQEIFSNEMAKVDDSFFHRLEESFLVEEDKKHERHPIFGNIVDEVAYHEKYPTIYHLRKKLVDSTDKADLRLIYLALAHMIKFRGHFLIEGDLNPDNSDVDKLFIQLVQTYNQLFEENPINASGVDAKAILSARLSKSRRLENLIAQLPGEKKNGLFGNLIALSLGLTPNFKSNFDLAEDAKLQLSKDTYDDDLDNLLAQIGDQYADLFLAAKNLSDAILLSDILRVNTEITKAPLSASMIKRYDEHHQDLTLLKALVRQQLPEKYKEIFFDQSKNGYAGYIDGGASQEEFYKFIKPILEKMDGTEELLVKLNREDLLRKQRTFDNGSIPHQIHLGELHAILRRQEDFYPFLKDNREKIEKILTFRIPYYVGPLARGNSRFAWMTRKSEETITPWNFEEVVDKGASAQSFIERMTNFDKNLPNEKVLPKHSLLYEYFTVYNELTKVKYVTEGMRKPAFLSGEQKKAIVDLLFKTNRKVTVKQLKEDYFKKIECFDSVEISGVEDRFNASLGTYHDLLKIIKDKDFLDNEENEDILEDIVLTLTLFEDREMIEERLKTYAHLFDDKVMKQLKRRRYTGWGRLSRKLINGIRDKQSGKTILDFLKSDGFANRNFMQLIHDDSLTFKEDIQKAQVSGQGDSLHEHIANLAGSPAIKKGILQTVKVVDELVKVMGRHKPENIVIEMARENQTTQKGQKNSRERMKRIEEGIKELGSQILKEHPVENTQLQNEKLYLYYLQNGRDMYVDQELDINRLSDYDVDHIVPQSFLKDDSIDNKVLTRSDKNRGKSDNVPSEEVVKKMKNYWRQLLNAKLITQRKFDNLTKAERGGLSELDKAGFIKRQLVETRQITKHVAQILDSRMNTKYDENDKLIREVKVITLKSKLVSDFRKDFQFYKVREINNYHAAHDAYLNAVVGTALIKKYPKLESEFVYGDYKVYDVRKMIAKSEQEIGKATAKYFFYSNIMNFFKTEITLANGEIRKRPLIETNGETGEIVWDKGRDFATVRKVLSMPQVNIVKKTEVQTGGFSKESILPKRNSDKLIARKKDWDPKKYGGFDSPTVAYSVLVVAKVEKGKSKKLKSVKELLGITIMERSSFEKNPIDFLEAKGYKEVKKDLIIKLPKYSLFELENGRKRMLASAGELQKGNELALPSKYVNFLYLASHYEKLKGSPEDNEQKQLFVEQHKHYLDEIIEQISEFSKRVILADANLDKVLSAYNKHRDKPIREQAENIIHLFTLTNLGAPAAFKYFDTTIDRKRYTSTKEVLDATLIHQSITGLYETRIDLSQLGGD

SEQ ID NO: 95 - protein, 1368 aa, Streptococcus pyogenes
MDKKYSIGLDIGTNSVGWAVITDEYKVPSKKFKVLGNTDRHSIKKNLIGALLFDSGETAEATRLKRTARRRYTRRKNRICYLQEIFSNEMAKVDDSFFHRLEESFLVEEDKKHERHPIFGNIVDEVAYHEKYPTIYHLRKKLVDSTDKADLRLIYLALAHMIKFRGHFLIEGDLNPDNSDVDKLFIQLVQTYNQLFEENPINASGVDAKAILSARLSKSRRLENLIAQLPGEKKNGLFGNLIALSLGLTPNFKSNFDLAEDAKLQLSKDTYDDDLDNLLAQIGDQYADLFLAAKNLSDAILLSDILRVNTEITKAPLSASMIKRYDEHHQDLTLLKALVRQQLPEKYKEIFFDQSKNGYAGYIDGGASQEEFYKFIKPILEKMDGTEELLVKLNREDLLRKQRTFDNGSIPHQIHLGELHAILRRQEDFYPFLKDNREKIEKILTFRIPYYVGPLARGNSRFAWMTRKSEETITPWNFEEVVDKGASAQSFIERMTNFDKNLPNEKVLPKHSLLYEYFTVYNELTKVKYVTEGMRKPAFLSGEQKKAIVDLLFKTNRKVTVKQLKEDYFKKIECFDSVEISGVEDRFNASLGTYHDLLKIIKDKDFLDNEENEDILEDIVLTLTLFEDREMIEERLKTYAHLFDDKVMKQLKRRRYTGWGRLSRKLINGIRDKQSGKTILDFLKSDGFANRNFMQLIHDDSLTFKEDIQKAQVSGQGDSLHEHIANLAGSPAIKKGILQTVKVVDELVKVMGRHKPENIVIEMARENQTTQKGQKNSRERMKRIEEGIKELGSQILKEHPVENTQLQNEKLYLYYLQNGRDMYVDQELDINRLSDYDVDHIVPQSFLKDDSIDNKVLTRSDKNRGKSDNVPSEEVVKKMKNYWRQLLNAKLITQRKFDNLTKAERGGLSELDKAGFIKRQLVETRQITKHVAQILDSRMNTKYDENDKLIREVKVITLKSKLVSDFRKDFQFYKVREINNYHHAHAAYLNAVVGTALIKKYPKLESEFVYGDYKVYDVRKMIAKSEQEIGKATAKYFFYSNIMNFFKTEITLANGEIRKRPLIETNGETGEIVWDKGRDFATVRKVLSMPQVNIVKKTEVQTGGFSKESILPKRNSDKLIARKKDWDPKKYGGFDSPTVAYSVLVVAKVEKGKSKKLKSVKELLGITIMERSSFEKNPIDFLEAKGYKEVKKDLIIKLPKYSLFELENGRKRMLASAGELQKGNELALPSKYVNFLYLASHYEKLKGSPEDNEQKQLFVEQHKHYLDEIIEQISEFSKRVILADANLDKVLSAYNKHRDKPIREQAENIIHLFTLTNLGAPAAFKYFDTTIDRKRYTSTKEVLDATLIHQSITGLYETRIDLSQLGGD

SEQ ID NO: 96 - protein, 1053 aa, Staphylococcus aureus
MGKRNYILGLAIGITSVGYGIIDYETRDVIDAGVRLFKEANVENNEGRRSKRGARRLKRRRRHRIQRVKKLLFDYNLLTDHSELSGINPYEARVKGLSQKLSEEEFSAALLHLAKRRGVHNVNEVEEDTGNELSTKEQISRNSKALEEKYVAELQLERLKKDGEVRGSINRFKTSDYVKEAKQLLKVQKAYHQLDQSFIDTYIDLLETRRTYYEGPGEGSPFGWKDIKEWYEMLMGHCTYFPEELRSVKYAYNADLYNALNDLNNLVITRDENEKLEYYEKFQIIENVFKQKKKPTLKQIAKEILVNEEDIKGYRVTSTGKPEFTNLKVYHDIKDITARKEIIENAELLDQIAKILTIYQSSEDIQEELTNLNSELTQEEIEQISNLKGYTGTHNLSLKAINLILDELWHTNDNQIAIFNRLKLVPKKVDLSQQKEIPTTLVDDFILSPVVKRSFIQSIKVINAIIKKYGLPNDIIIELAREKNSKDAQKMINEMQKRNRQTNERIEEIIRTTGKENAKYLIEKIKLHDMQEGKCLYSLEAIPLEDLLNNPFNYEVDHIIPRSVSFDNSFNNKVLVKQEENSKKGNRTPFQYLSSSDSKISYETFKKHILNLAKGKGRISKTKKEYLLEERDINRFSVQKDFINRNLVDTRYATRGLMNLLRSYFRVNNLDVKVKSINGGFTSFLRRKWKFKKERNKGYKHHAEDALIIANADFIFKEWKKLDKAKKVMENQMFEEKQAESMPEIETEQEYKEIFITPHQIKHIKDFKDYKYSHRVDKKPNRKLINDTLYSTRKDDKGNTLIVNNLNGLYDKDNDKLKKLINKSPEKLLMYHHDPQTYQKLKLIMEQYGDEKNPLYKYYEETGNYLTKYSKKDNGPVIKKIKYYGNKLNAHLDITDDYPNSRNKVVKLSLKPYRFDVYLDNGVYKFVTVKNLDVIKKENYYEVNSKCYEEAKKLKKISNQAEFIASFYKNDLIKINGELYRVIGVNNDLLNRIEVNMIDITYREYLENMNDKRPPHIIKTIASKTQSIKKYSTDILGNLYEVKSKKHPQIIKK

SEQ ID NO: 97 - protein, 1368 aa, Streptococcus pyogenes
  misc_feature (840)..(840): Xaa can be any naturally occurring amino acid
MDKKYSIGLDIGTNSVGWAVITDEYKVPSKKFKVLGNTDRHSIKKNLIGALLFDSGETAEATRLKRTARRRYTRRKNRICYLQEIFSNEMAKVDDSFFHRLEESFLVEEDKKHERHPIFGNIVDEVAYHEKYPTIYHLRKKLVDSTDKADLRLIYLALAHMIKFRGHFLIEGDLNPDNSDVDKLFIQLVQTYNQLFEENPINASGVDAKAILSARLSKSRRLENLIAQLPGEKKNGLFGNLIALSLGLTPNFKSNFDLAEDAKLQLSKDTYDDDLDNLLAQIGDQYADLFLAAKNLSDAILLSDILRVNTEITKAPLSASMIKRYDEHHQDLTLLKALVRQQLPEKYKEIFFDQSKNGYAGYIDGGASQEEFYKFIKPILEKMDGTEELLVKLNREDLLRKQRTFDNGSIPHQIHLGELHAILRRQEDFYPFLKDNREKIEKILTFRIPYYVGPLARGNSRFAWMTRKSEETITPWNFEEVVDKGASAQSFIERMTNFDKNLPNEKVLPKHSLLYEYFTVYNELTKVKYVTEGMRKPAFLSGEQKKAIVDLLFKTNRKVTVKQLKEDYFKKIECFDSVEISGVEDRFNASLGTYHDLLKIIKDKDFLDNEENEDILEDIVLTLTLFEDREMIEERLKTYAHLFDDKVMKQLKRRRYTGWGRLSRKLINGIRDKQSGKTILDFLKSDGFANRNFMQLIHDDSLTFKEDIQKAQVSGQGDSLHEHIANLAGSPAIKKGILQTVKVVDELVKVMGRHKPENIVIEMARENQTTQKGQKNSRERMKRIEEGIKELGSQILKEHPVENTQLQNEKLYLYYLQNGRDMYVDQELDINRLSDYDVDXIVPQSFLKDDSIDNKVLTRSDKNRGKSDNVPSEEVVKKMKNYWRQLLNAKLITQRKFDNLTKAERGGLSELDKAGFIKRQLVETRQITKHVAQILDSRMNTKYDENDKLIREVKVITLKSKLVSDFRKDFQFYKVREINNYHHAHDAYLNAVVGTALIKKYPKLESEFVYGDYKVYDVRKMIAKSEQEIGKATAKYFFYSNIMNFFKTEITLANGEIRKRPLIETNGETGEIVWDKGRDFATVRKVLSMPQVNIVKKTEVQTGGFSKESILPKRNSDKLIARKKDWDPKKYGGFDSPTVAYSVLVVAKVEKGKSKKLKSVKELLGITIMERSSFEKNPIDFLEAKGYKEVKKDLIIKLPKYSLFELENGRKRMLASAGELQKGNELALPSKYVNFLYLASHYEKLKGSPEDNEQKQLFVEQHKHYLDEIIEQISEFSKRVILADANLDKVLSAYNKHRDKPIREQAENIIHLFTLTNLGAPAAFKYFDTTIDRKRYTSTKEVLDATLIHQSITGLYETRIDLSQLGGD

SEQ ID NO: 98 - protein, 1368 aa, Streptococcus pyogenes
MDKKYSIGLDIGTNSVGWAVITDEYKVPSKKFKVLGNTDRHSIKKNLIGALLFDSGETAEATRLKRTARRRYTRRKNRICYLQEIFSNEMAKVDDSFFHRLEESFLVEEDKKHERHPIFGNIVDEVAYHEKYPTIYHLRKKLVDSTDKADLRLIYLALAHMIKFRGHFLIEGDLNPDNSDVDKLFIQLVQTYNQLFEENPINASGVDAKAILSARLSKSRRLENLIAQLPGEKKNGLFGNLIALSLGLTPNFKSNFDLAEDAKLQLSKDTYDDDLDNLLAQIGDQYADLFLAAKNLSDAILLSDILRVNTEITKAPLSASMIKRYDEHHQDLTLLKALVRQQLPEKYKEIFFDQSKNGYAGYIDGGASQEEFYKFIKPILEKMDGTEELLVKLNREDLLRKQRTFDNGSIPHQIHLGELHAILRRQEDFYPFLKDNREKIEKILTFRIPYYVGPLARGNSRFAWMTRKSEETITPWNFEEVVDKGASAQSFIERMTNFDKNLPNEKVLPKHSLLYEYFTVYNELTKVKYVTEGMRKPAFLSGEQKKAIVDLLFKTNRKVTVKQLKEDYFKKIECFDSVEISGVEDRFNASLGTYHDLLKIIKDKDFLDNEENEDILEDIVLTLTLFEDREMIEERLKTYAHLFDDKVMKQLKRRRYTGWGRLSRKLINGIRDKQSGKTILDFLKSDGFANRNFMQLIHDDSLTFKEDIQKAQVSGQGDSLHEHIANLAGSPAIKKGILQTVKVVDELVKVMGRHKPENIVIEMARENQTTQKGQKNSRERMKRIEEGIKELGSQILKEHPVENTQLQNEKLYLYYLQNGRDMYVDQELDINRLSDYDVDAIVPQSFLKDDSIDNKVLTRSDKNRGKSDNVPSEEVVKKMKNYWRQLLNAKLITQRKFDNLTKAERGGLSELDKAGFIKRQLVETRQITKHVAQILDSRMNTKYDENDKLIREVKVITLKSKLVSDFRKDFQFYKVREINNYHHAHDAYLNAVVGTALIKKYPKLESEFVYGDYKVYDVRKMIAKSEQEIGKATAKYFFYSNIMNFFKTEITLANGEIRKRPLIETNGETGEIVWDKGRDFATVRKVLSMPQVNIVKKTEVQTGGFSKESILPKRNSDKLIARKKDWDPKKYGGFDSPTVAYSVLVVAKVEKGKSKKLKSVKELLGITIMERSSFEKNPIDFLEAKGYKEVKKDLIIKLPKYSLFELENGRKRMLASAGELQKGNELALPSKYVNFLYLASHYEKLKGSPEDNEQKQLFVEQHKHYLDEIIEQISEFSKRVILADANLDKVLSAYNKHRDKPIREQAENIIHLFTLTNLGAPAAFKYFDTTIDRKRYTSTKEVLDATLIHQSITGLYETRIDLSQLGGD

SEQ ID NO: 99 - protein, 1368 aa, Streptococcus pyogenes
  misc_feature (864)..(864): Xaa can be any naturally occurring amino acid
MDKKYSIGLDIGTNSVGWAVITDEYKVPSKKFKVLGNTDRHSIKKNLIGALLFDSGETAEATRLKRTARRRYTRRKNRICYLQEIFSNEMAKVDDSFFHRLEESFLVEEDKKHERHPIFGNIVDEVAYHEKYPTIYHLRKKLVDSTDKADLRLIYLALAHMIKFRGHFLIEGDLNPDNSDVDKLFIQLVQTYNQLFEENPINASGVDAKAILSARLSKSRRLENLIAQLPGEKKNGLFGNLIALSLGLTPNFKSNFDLAEDAKLQLSKDTYDDDLDNLLAQIGDQYADLFLAAKNLSDAILLSDILRVNTEITKAPLSASMIKRYDEHHQDLTLLKALVRQQLPEKYKEIFFDQSKNGYAGYIDGGASQEEFYKFIKPILEKMDGTEELLVKLNREDLLRKQRTFDNGSIPHQIHLGELHAILRRQEDFYPFLKDNREKIEKILTFRIPYYVGPLARGNSRFAWMTRKSEETITPWNFEEVVDKGASAQSFIERMTNFDKNLPNEKVLPKHSLLYEYFTVYNELTKVKYVTEGMRKPAFLSGEQKKAIVDLLFKTNRKVTVKQLKEDYFKKIECFDSVEISGVEDRFNASLGTYHDLLKIIKDKDFLDNEENEDILEDIVLTLTLFEDREMIEERLKTYAHLFDDKVMKQLKRRRYTGWGRLSRKLINGIRDKQSGKTILDFLKSDGFANRNFMQLIHDDSLTFKEDIQKAQVSGQGDSLHEHIANLAGSPAIKKGILQTVKVVDELVKVMGRHKPENIVIEMARENQTTQKGQKNSRERMKRIEEGIKELGSQILKEHPVENTQLQNEKLYLYYLQNGRDMYVDQELDINRLSDYDVDHIVPQSFLKDDSIDNKVLTRSDKNXGKSDNVPSEEVVKKMKNYWRQLLNAKLITQRKFDNLTKAERGGLSELDKAGFIKRQLVETRQITKHVAQILDSRMNTKYDENDKLIREVKVITLKSKLVSDFRKDFQFYKVREINNYHHAHDAYLNAVVGTALIKKYPKLESEFVYGDYKVYDVRKMIAKSEQEIGKATAKYFFYSNIMNFFKTEITLANGEIRKRPLIETNGETGEIVWDKGRDFATVRKVLSMPQVNIVKKTEVQTGGFSKESILPKRNSDKLIARKKDWDPKKYGGFDSPTVAYSVLVVAKVEKGKSKKLKSVKELLGITIMERSSFEKNPIDFLEAKGYKEVKKDLIIKLPKYSLFELENGRKRMLASAGELQKGNELALPSKYVNFLYLASHYEKLKGSPEDNEQKQLFVEQHKHYLDEIIEQISEFSKRVILADANLDKVLSAYNKHRDKPIREQAENIIHLFTLTNLGAPAAFKYFDTTIDRKRYTSTKEVLDATLIHQSITGLYETRIDLSQLGGD

SEQ ID NO: 100 - protein, 1368 aa, Streptococcus pyogenes
MDKKYSIGLDIGTNSVGWAVITDEYKVPSKKFKVLGNTDRHSIKKNLIGALLFDSGETAEATRLKRTARRRYTRRKNRICYLQEIFSNEMAKVDDSFFHRLEESFLVEEDKKHERHPIFGNIVDEVAYHEKYPTIYHLRKKLVDSTDKADLRLIYLALAHMIKFRGHFLIEGDLNPDNSDVDKLFIQLVQTYNQLFEENPINASGVDAKAILSARLSKSRRLENLIAQLPGEKKNGLFGNLIALSLGLTPNFKSNFDLAEDAKLQLSKDTYDDDLDNLLAQIGDQYADLFLAAKNLSDAILLSDILRVNTEITKAPLSASMIKRYDEHHQDLTLLKALVRQQLPEKYKEIFFDQSKNGYAGYIDGGASQEEFYKFIKPILEKMDGTEELLVKLNREDLLRKQRTFDNGSIPHQIHLGELHAILRRQEDFYPFLKDNREKIEKILTFRIPYYVGPLARGNSRFAWMTRKSEETITPWNFEEVVDKGASAQSFIERMTNFDKNLPNEKVLPKHSLLYEYFTVYNELTKVKYVTEGMRKPAFLSGEQKKAIVDLLFKTNRKVTVKQLKEDYFKKIECFDSVEISGVEDRFNASLGTYHDLLKIIKDKDFLDNEENEDILEDIVLTLTLFEDREMIEERLKTYAHLFDDKVMKQLKRRRYTGWGRLSRKLINGIRDKQSGKTILDFLKSDGFANRNFMQLIHDDSLTFKEDIQKAQVSGQGDSLHEHIANLAGSPAIKKGILQTVKVVDELVKVMGRHKPENIVIEMARENQTTQKGQKNSRERMKRIEEGIKELGSQILKEHPVENTQLQNEKLYLYYLQNGRDMYVDQELDINRLSDYDVDHIVPQSFLKDDSIDNKVLTRSDKNAGKSDNVPSEEVVKKMKNYWRQLLNAKLITQRKFDNLTKAERGGLSELDKAGFIKRQLVETRQITKHVAQILDSRMNTKYDENDKLIREVKVITLKSKLVSDFRKDFQFYKVREINNYHHAHDAYLNAVVGTALIKKYPKLESEFVYGDYKVYDVRKMIAKSEQEIGKATAKYFFYSNIMNFFKTEITLANGEIRKRPLIETNGETGEIVWDKGRDFATVRKVLSMPQVNIVKKTEVQTGGFSKESILPKRNSDKLIARKKDWDPKKYGGFDSPTVAYSVLVVAKVEKGKSKKLKSVKELLGITIMERSSFEKNPIDFLEAKGYKEVKKDLIIKLPKYSLFELENGRKRMLASAGELQKGNELALPSKYVNFLYLASHYEKLKGSPEDNEQKQLFVEQHKHYLDEIIEQISEFSKRVILADANLDKVLSAYNKHRDKPIREQAENIIHLFTLTNLGAPAAFKYFDTTIDRKRYTSTKEVLDATLIHQSITGLYETRIDLSQLGGD

SEQ ID NO: 101 - protein, 1367 aa, Streptococcus pyogenes
  misc_feature (839)..(839): Xaa can be any naturally occurring amino acid
DKKYSIGLDIGTNSVGWAVITDEYKVPSKKFKVLGNTDRHSIKKNLIGALLFDSGETAEATRLKRTARRRYTRRKNRICYLQEIFSNEMAKVDDSFFHRLEESFLVEEDKKHERHPIFGNIVDEVAYHEKYPTIYHLRKKLVDSTDKADLRLIYLALAHMIKFRGHFLIEGDLNPDNSDVDKLFIQLVQTYNQLFEENPINASGVDAKAILSARLSKSRRLENLIAQLPGEKKNGLFGNLIALSLGLTPNFKSNFDLAEDAKLQLSKDTYDDDLDNLLAQIGDQYADLFLAAKNLSDAILLSDILRVNTEITKAPLSASMIKRYDEHHQDLTLLKALVRQQLPEKYKEIFFDQSKNGYAGYIDGGASQEEFYKFIKPILEKMDGTEELLVKLNREDLLRKQRTFDNGSIPHQIHLGELHAILRRQEDFYPFLKDNREKIEKILTFRIPYYVGPLARGNSRFAWMTRKSEETITPWNFEEVVDKGASAQSFIERMTNFDKNLPNEKVLPKHSLLYEYFTVYNELTKVKYVTEGMRKPAFLSGEQKKAIVDLLFKTNRKVTVKQLKEDYFKKIECFDSVEISGVEDRFNASLGTYHDLLKIIKDKDFLDNEENEDILEDIVLTLTLFEDREMIEERLKTYAHLFDDKVMKQLKRRRYTGWGRLSRKLINGIRDKQSGKTILDFLKSDGFANRNFMQLIHDDSLTFKEDIQKAQVSGQGDSLHEHIANLAGSPAIKKGILQTVKVVDELVKVMGRHKPENIVIEMARENQTTQKGQKNSRERMKRIEEGIKELGSQILKEHPVENTQLQNEKLYLYYLQNGRDMYVDQELDINRLSDYDVDXIVPQSFLKDDSIDNKVLTRSDKNRGKSDNVPSEEVVKKMKNYWRQLLNAKLITQRKFDNLTKAERGGLSELDKAGFIKRQLVETRQITKHVAQILDSRMNTKYDENDKLIREVKVITLKSKLVSDFRKDFQFYKVREINNYHHAHDAYLNAVVGTALIKKYPKLESEFVYGDYKVYDVRKMIAKSEQEIGKATAKYFFYSNIMNFFKTEITLANGEIRKRPLIETNGETGEIVWDKGRDFATVRKVLSMPQVNIVKKTEVQTGGFSKESILPKRNSDKLIARKKDWDPKKYGGFDSPTVAYSVLVVAKVEKGKSKKLKSVKELLGITIMERSSFEKNPIDFLEAKGYKEVKKDLIIKLPKYSLFELENGRKRMLASAGELQKGNELALPSKYVNFLYLASHYEKLKGSPEDNEQKQLFVEQHKHYLDEIIEQISEFSKRVILADANLDKVLSAYNKHRDKPIREQAENIIHLFTLTNLGAPAAFKYFDTTIDRKRYTSTKEVLDATLIHQSITGLYETRIDLSQLGGD

SEQ ID NO: 102 - protein, 1367 aa, Streptococcus pyogenes
DKKYSIGLDIGTNSVGWAVITDEYKVPSKKFKVLGNTDRHSIKKNLIGALLFDSGETAEATRLKRTARRRYTRRKNRICYLQEIFSNEMAKVDDSFFHRLEESFLVEEDKKHERHPIFGNIVDEVAYHEKYPTIYHLRKKLVDSTDKADLRLIYLALAHMIKFRGHFLIEGDLNPDNSDVDKLFIQLVQTYNQLFEENPINASGVDAKAILSARLSKSRRLENLIAQLPGEKKNGLFGNLIALSLGLTPNFKSNFDLAEDAKLQLSKDTYDDDLDNLLAQIGDQYADLFLAAKNLSDAILLSDILRVNTEITKAPLSASMIKRYDEHHQDLTLLKALVRQQLPEKYKEIFFDQSKNGYAGYIDGGASQEEFYKFIKPILEKMDGTEELLVKLNREDLLRKQRTFDNGSIPHQIHLGELHAILRRQEDFYPFLKDNREKIEKILTFRIPYYVGPLARGNSRFAWMTRKSEETITPWNFEEVVDKGASAQSFIERMTNFDKNLPNEKVLPKHSLLYEYFTVYNELTKVKYVTEGMRKPAFLSGEQKKAIVDLLFKTNRKVTVKQLKEDYFKKIECFDSVEISGVEDRFNASLGTYHDLLKIIKDKDFLDNEENEDILEDIVLTLTLFEDREMIEERLKTYAHLFDDKVMKQLKRRRYTGWGRLSRKLINGIRDKQSGKTILDFLKSDGFANRNFMQLIHDDSLTFKEDIQKAQVSGQGDSLHEHIANLAGSPAIKKGILQTVKVVDELVKVMGRHKPENIVIEMARENQTTQKGQKNSRERMKRIEEGIKELGSQILKEHPVENTQLQNEKLYLYYLQNGRDMYVDQELDINRLSDYDVDAIVPQSFLKDDSIDNKVLTRSDKNRGKSDNVPSEEVVKKMKNYWRQLLNAKLITQRKFDNLTKAERGGLSELDKAGFIKRQLVETRQITKHVAQILDSRMNTKYDENDKLIREVKVITLKSKLVSDFRKDFQFYKVREINNYHHAHDAYLNAVVGTALIKKYPKLESEFVYGDYKVYDVRKMIAKSEQEIGKATAKYFFYSNIMNFFKTEITLANGEIRKRPLIETNGETGEIVWDKGRDFATVRKVLSMPQVNIVKKTEVQTGGFSKESILPKRNSDKLIARKKDWDPKKYGGFDSPTVAYSVLVVAKVEKGKSKKLKSVKELLGITIMERSSFEKNPIDFLEAKGYKEVKKDLIIKLPKYSLFELENGRKRMLASAGELQKGNELALPSKYVNFLYLASHYEKLKGSPEDNEQKQLFVEQHKHYLDEIIEQISEFSKRVILADANLDKVLSAYNKHRDKPIREQAENIIHLFTLTNLGAPAAFKYFDTTIDRKRYTSTKEVLDATLIHQSITGLYETRIDLSQLGGD

SEQ ID NO: 103 - protein, 1367 aa, Streptococcus pyogenes
  misc_feature (863)..(863): Xaa can be any naturally occurring amino acid
DKKYSIGLDIGTNSVGWAVITDEYKVPSKKFKVLGNTDRHSIKKNLIGALLFDSGETAEATRLKRTARRRYTRRKNRICYLQEIFSNEMAKVDDSFFHRLEESFLVEEDKKHERHPIFGNIVDEVAYHEKYPTIYHLRKKLVDSTDKADLRLIYLALAHMIKFRGHFLIEGDLNPDNSDVDKLFIQLVQTYNQLFEENPINASGVDAKAILSARLSKSRRLENLIAQLPGEKKNGLFGNLIALSLGLTPNFKSNFDLAEDAKLQLSKDTYDDDLDNLLAQIGDQYADLFLAAKNLSDAILLSDILRVNTEITKAPLSASMIKRYDEHHQDLTLLKALVRQQLPEKYKEIFFDQSKNGYAGYIDGGASQEEFYKFIKPILEKMDGTEELLVKLNREDLLRKQRTFDNGSIPHQIHLGELHAILRRQEDFYPFLKDNREKIEKILTFRIPYYVGPLARGNSRFAWMTRKSEETITPWNFEEVVDKGASAQSFIERMTNFDKNLPNEKVLPKHSLLYEYFTVYNELTKVKYVTEGMRKPAFLSGEQKKAIVDLLFKTNRKVTVKQLKEDYFKKIECFDSVEISGVEDRFNASLGTYHDLLKIIKDKDFLDNEENEDILEDIVLTLTLFEDREMIEERLKTYAHLFDDKVMKQLKRRRYTGWGRLSRKLINGIRDKQSGKTILDFLKSDGFANRNFMQLIHDDSLTFKEDIQKAQVSGQGDSLHEHIANLAGSPAIKKGILQTVKVVDELVKVMGRHKPENIVIEMARENQTTQKGQKNSRERMKRIEEGIKELGSQILKEHPVENTQLQNEKLYLYYLQNGRDMYVDQELDINRLSDYDVDHIVPQSFLKDDSIDNKVLTRSDKNXGKSDNVPSEEVVKKMKNYWRQLLNAKLITQRKFDNLTKAERGGLSELDKAGFIKRQLVETRQITKHVAQILDSRMNTKYDENDKLIREVKVITLKSKLVSDFRKDFQFYKVREINNYHHAHDAYLNAVVGTALIKKYPKLESEFVYGDYKVYDVRKMIAKSEQEIGKATAKYFFYSNIMNFFKTEITLANGEIRKRPLIETNGETGEIVWDKGRDFATVRKVLSMPQVNIVKKTEVQTGGFSKESILPKRNSDKLIARKKDWDPKKYGGFDSPTVAYSVLVVAKVEKGKSKKLKSVKELLGITIMERSSFEKNPIDFLEAKGYKEVKKDLIIKLPKYSLFELENGRKRMLASAGELQKGNELALPSKYVNFLYLASHYEKLKGSPEDNEQKQLFVEQHKHYLDEIIEQISEFSKRVILADANLDKVLSAYNKHRDKPIREQAENIIHLFTLTNLGAPAAFKYFDTTIDRKRYTSTKEVLDATLIHQSITGLYETRIDLSQLGGD

SEQ ID NO: 104 - protein, 1367 aa, Streptococcus pyogenes
DKKYSIGLDIGTNSVGWAVITDEYKVPSKKFKVLGNTDRHSIKKNLIGALLFDSGETAEATRLKRTARRRYTRRKNRICYLQEIFSNEMAKVDDSFFHRLEESFLVEEDKKHERHPIFGNIVDEVAYHEKYPTIYHLRKKLVDSTDKADLRLIYLALAHMIKFRGHFLIEGDLNPDNSDVDKLFIQLVQTYNQLFEENPINASGVDAKAILSARLSKSRRLENLIAQLPGEKKNGLFGNLIALSLGLTPNFKSNFDLAEDAKLQLSKDTYDDDLDNLLAQIGDQYADLFLAAKNLSDAILLSDILRVNTEITKAPLSASMIKRYDEHHQDLTLLKALVRQQLPEKYKEIFFDQSKNGYAGYIDGGASQEEFYKFIKPILEKMDGTEELLVKLNREDLLRKQRTFDNGSIPHQIHLGELHAILRRQEDFYPFLKDNREKIEKILTFRIPYYVGPLARGNSRFAWMTRKSEETITPWNFEEVVDKGASAQSFIERMTNFDKNLPNEKVLPKHSLLYEYFTVYNELTKVKYVTEGMRKPAFLSGEQKKAIVDLLFKTNRKVTVKQLKEDYFKKIECFDSVEISGVEDRFNASLGTYHDLLKIIKDKDFLDNEENEDILEDIVLTLTLFEDREMIEERLKTYAHLFDDKVMKQLKRRRYTGWGRLSRKLINGIRDKQSGKTILDFLKSDGFANRNFMQLIHDDSLTFKEDIQKAQVSGQGDSLHEHIANLAGSPAIKKGILQTVKVVDELVKVMGRHKPENIVIEMARENQTTQKGQKNSRERMKRIEEGIKELGSQILKEHPVENTQLQNEKLYLYYLQNGRDMYVDQELDINRLSDYDVDHIVPQSFLKDDSIDNKVLTRSDKNAGKSDNVPSEEVVKKMKNYWRQLLNAKLITQRKFDNLTKAERGGLSELDKAGFIKRQLVETRQITKHVAQILDSRMNTKYDENDKLIREVKVITLKSKLVSDFRKDFQFYKVREINNYHHAHDAYLNAVVGTALIKKYPKLESEFVYGDYKVYDVRKMIAKSEQEIGKATAKYFFYSNIMNFFKTEITLANGEIRKRPLIETNGETGEIVWDKGRDFATVRKVLSMPQVNIVKKTEVQTGGFSKESILPKRNSDKLIARKKDWDPKKYGGFDSPTVAYSVLVVAKVEKGKSKKLKSVKELLGITIMERSSFEKNPIDFLEAKGYKEVKKDLIIKLPKYSLFELENGRKRMLASAGELQKGNELALPSKYVNFLYLASHYEKLKGSPEDNEQKQLFVEQHKHYLDEIIEQISEFSKRVILADANLDKVLSAYNKHRDKPIREQAENIIHLFTLTNLGAPAAFKYFDTTIDRKRYTSTKEVLDATLIHQSITGLYETRIDLSQLGGD

SEQ ID NO: 105 - protein, 1053 aa, Staphylococcus aureus; identical to SEQ ID NO: 73

SEQ ID NO: 106 - protein, 1082 aa, N. meningitidis
MAAFKPNSINYILGLDIGIASVGWAMVEIDEEENPIRLIDLGVRVFERAEVPKTGDSLAMARRLARSVRRLTRRRAHRLLRTRRLLKREGVLQAANFDENGLIKSLPNTPWQLRAAALDRKLTPLEWSAVLLHLIKHRGYLSQRKNEGETADKELGALLKGVAGNAHALQTGDFRTPAELALNKFEKESGHIRNQRSDYSHTFSRKDLQAELILLFEKQKEFGNPHVSGGLKEGIETLLMTQRPALSGDAVQKMLGHCTFEPAEPKAAKNTYTAERFIWLTKLNNLRILEQGSERPLTDTERATLMDEPYRKSKLTYAQARKLLGLEDTAFFKGLRYGKDNAEASTLMEMKAYHAISRALEKEGLKDKKSPLNLSPELQDEIGTAFSLFKTDEDITGRLKDRIQPEILEALLKHISFDKFVQISLKALRRIVPLMEQGKRYDEACAEIYGDHYGKKNTEEKIYLPPIPADEIRNPVVLRALSQARKVINGVVRRYGSPARIHIETAREVGKSFKDRKEIEKRQEENRKDREKAAAKFREYFPNFVGEPKSKDILKLRLYEQQHGKCLYSGKEINLGRLNEKGYVEIDAALPFSRTWDDSFNNKVLVLGSENQNKGNQTPYEYFNGKDNSREWQEFKARVETSRFPRSKKQRILLQKFDEDGFKERNLNDTRYVNRFLCQFVADRMRLTGKGKKRVFASNGQITNLLRGFWGLRKVRAENDRHHALDAVVVACSTVAMQQKITRFVRYKEMNAFDGKTIDKETGEVLHQKTHFPQPWEFFAQEVMIRVFGKPDGKPEFEEADTLEKLRTLLAEKLSSRPEAVHEYVTPLFVSRAPNRKMSGQGHMETVKSAKRLDEGVSVLRVPLTQLKLKDLEKMVNREREPKLYEALKARLEAHKDDPAKAFAEPFYKYDKAGNRTQQVKAVRVEQVQKTGVWVRNHNGIADNATMVRVDVFEKGDKYYLVPIYSWQVAKGILPDRAVVQGKDEEDWQLIDDSFNFKFSLHPNDLVEVITKKARMFGYFASCHRGTGNINIRIHDLDHKIGKNGILEGIGVKTALSFQKYQIDELGKEIRPCRLKKRPPVR

SEQ ID NO: 107 - protein, 984 aa, C. jejuni
MARILAFDIGISSIGWAFSENDELKDCGVRIFTKVENPKTGESLALPRRLARSARKRLARRKARLNHLKHLIANEFKLNYEDYQSFDESLAKAYKGSLISPYELRFRALNELLSKQDFARVILHIAKRRGYDDIKNSDDKEKGAILKAIKQNEEKLANYQSVGEYLYKEYFQKFKENSKEFTNVRNKKESYERCIAQSFLKDELKLIFKKQREFGFSFSKKFEEEVLSVAFYKRALKDFSHLVGNCSFFTDEKRAPKNSPLAFMFVALTRIINLLNNLKNTEGILYTKDDLNALLNEVLKNGTLTYKQTKKLLGLSDDYEFKGEKGTYFIEFKKYKEFIKALGEHNLSQDDLNEIAKDITLIKDEIKLKKALAKYDLNQNQIDSLSKLEFKDHLNISFKALKLVTPLMLEGKKYDEACNELNLKVAINEDKKDFLPAFNETYYKDEVTNPVVLRAIKEYRKVLNALLKKYGKVHKINIELAREVGKNHSQRAKIEKEQNENYKAKKDAELECEKLGLKINSKNILKLRLFKEQKEFCAYSGEKIKISDLQDEKMLEIDHIYPYSRSFDDSYMNKVLVFTKQNQEKLNQTPFEAFGNDSAKWQKIEVLAKNLPTKKQKRILDKNYKDKEQKNFKDRNLNDTRYIARLVLNYTKDYLDFLPLSDDENTKLNDTQKGSKVHVEAKSGMLTSALRHTWGFSAKDRNNHLHHAIDAVIIAYANNSIVKAFSDFKKEQESNSAELYAKKISELDYKNKRKFFEPFSGFRQKVLDKIDEIFVSKPERKKPSGALHEETFRKEEEFYQSYGGKEGVLKALELGKIRKVNGKIVKNGDMFRVDIFKHKKTNKFYAVPIYTMDFALKVLPNKAVARSKKGEIKDWILMDENYEFCFSLYKDSLILIQTKDMQEPEFVYYNAFTSSTVSLIVSKHDNKFETLSKNQKILFKNANEKEVIAKSIGIQNLKVFEKYIVSALGEVTKAEFRQREDFKK

SEQ ID NO: 108 - protein, 1087 aa, G. stearothermophilus
MRYKIGLDIGITSVGWAVMNLDIPRIEDLGVRIFDRAENPQTGESLALPRRLARSARRRLRRRKHRLERIRRLVIREGILTKEELDKLFEEKHEIDVWQLRVEALDRKLNNDELARVLLHLAKRRGFKSNRKSERSNKENSTMLKHIEENRAILSSYRTVGEMIVKDPKFALHKRNKGENYTNTIARDDLEREIRLIFSKQREFGNMSCTEEFENEYITIWASQRPVASKDDIEKKVGFCTFEPKEKRAPKATYTFQSFIAWEHINKLRLISPSGARGLTDEERRLLYEQAFQKNKITYHDIRTLLHLPDDTYFKGIVYDRGESRKQNENIRFLELDAYHQIRKAVDKVYGKGKSSSFLPIDFDTFGYALTLFKDDADIHSYLRNEYEQNGKRMPNLANKVYDNELIEELLNLSFTKFGHLSLKALRSILPYMEQGEVYSSACERAGYTFTGPKKKQKTMLLPNIPPIANPVVMRALTQARKVVNAIIKKYGSPVSIHIELARDLSQTFDERRKTKKEQDENRKKNETAIRQLMEYGLTLNPTGHDIVKFKLWSEQNGRCAYSLQPIEIERLLEPGYVEVDHVIPYSRSLDDSYTNKVLVLTRENREKGNRIPAEYLGVGTERWQQFETFVLTNKQFSKKKRDRLLRLHYDENEETEFKNRNLNDTRYISRFFANFIREHLKFAESDDKQKVYTVNGRVTAHLRSRWEFNKNREESDLHHAVDAVIVACTTPSDIAKVTAFYQRREQNKELAKKTEPHFPQPWPHFADELRARLSKHPKESIKALNLGNYDDQKLESLQPVFVSRMPKRSVTGAAHQETLRRYVGIDERSGKIQTVVKTKLSEIKLDASGHFPMYGKESDPRTYEAIRQRLLEHNNDPKKAFQEPLYKPKKNGEPGPVIRTVKIIDTKNQVIPLNDGKTVAYNSNIVRVDVFEKDGKYYCVPVYTMDIMKGILPNKAIEPNKPYSEWKEMTEDYTFRFSLYPNDLIRIELPREKTVKTAAGEEINVKDVFVYYKTIDSANGGLELISHDHRFSLRGVGSRTLKRFEKYQVDVLGNIYKVRGEKRVGLASSAHSKPGKTIRPLQSTRD

SEQ ID NO: 109 - protein, 1228 aa, L. bacterium
MSKLEKFTNCYSLSKTLRFKAIPVGKTQENIDNKRLLVEDEKRAEDYKGVKKLLDRYYLSFINDVLHSIKLKNLNNYISLFRKKTRTEKENKELENLEINLRKEIAKAFKGNEGYKSLFKKDIIETILPEFLDDKDEIALVNSFNGFTTAFTGFFDNRENMFSEEAKSTSIAFRCINENLTRYISNMDIFEKVDAIFDKHEVQEIKEKILNSDYDVEDFFEGEFFNFVLTQEGIDVYNAIIGGFVTESGEKIKGLNEYINLYNQKTKQKLPKFKPLYKQVLSDRESLSFYGEGYTSDEEVLEVFRNTLNKNSEIFSSIKKLEKLFKNFDEYSSAGIFVKNGPAISTISKDIFGEWNVIRDKWNAEYDDIHLKKKAVVTEKYEDDRRKSFKKIGSFSLEQLQEYADADLSVVEKLKEIIIQKVDEIYKVYGSSEKLFDADFVLEKSLKKNDAVVAIMKDLLDSVKSFENYIKAFFGEGKETNRDESFYGDFVLAYDILLKVDHIYDAIRNYVTQKPYSKDKFKLYFQNPQFMGGWDKDKETDYRATILRYGSKYYLAIMDKKYAKCLQKIDKDDVNGNYEKINYKLLPGPNKMLPKVFFSKKWMAYYNPSEDIQKIYKNGTFKKGDMFNLNDCHKLIDFFKDSISRYPKWSNAYDFNFSETEKYKDIAGFYREVEEQGYKVSFESASKKEVDKLVEEGKLYMFQIYNKDFSDKSHGTPNLHTMYFKLLFDENNHGQIRLSGGAELFMRRASLKKEELVVHPANSPIANKNPDNPKKTTTLSYDVYKDKRFSEDQYELHIPIAINKCPKNIFKINTEVRVLLKHDDNPYVIGIDRGERNLLYIVVVDGKGNIVEQYSLNEIINNFNGIRIKTDYHSLLDKKEKERFEARQNWTSIENIKELKAGYISQVVHKICELVEKYDAVIALEDLNSGFKNSRVKVEKQVYQKFEKMLIDKLNYMVDKKSNPCATGGALKGYQITNKFESFKSMSTQNGFIFYIPAWLTSKIDPSTGFVNLLKTKYTSIADSKKFISSFDRIMYVPEEDLFEFALDYKNFSRTDADYIKKWKLYSYGNRIRIFRNPKKNNVFDWEEVCLTSAYKELFNKYGINYQQGDIRALLCEQSDKAFYSSFMALMSLMLQMRNSITGRTDVDFLISPVKNSDGIFYDSRNYEAQENAILPKNADANGAYNIARKVLWAIGQFKKAEDEKLDKVKIAISNKEWLEYAQTSVKH

SEQ ID NO: 110 - protein, 1108 aa, B. hisashii
MATRSFILKIEPNEEVKKGLWKTHEVLNHGIAYYMNILKLIRQEAIYEHHEQDPKNPKKVSKAEIQAELWDFVLKMQKCNSFTHEVDKDEVFNILRELYEELVPSSVEKKGEANQLSNKFLYPLVDPNSQSGKGTASSGRKPRWYNLKIAGDPSWEEEKKKWEEDKKKDPLAKILGKLAEYGLIPLFIPYTDSNEPIVKEIKWMEKSRNQSVRRLDKDMFIQALERFLSWESWNLKVKEEYEKVEKEYKTLEERIKEDIQALKALEQYEKERQEQLLRDTLNTNEYRLSKRGLRGWREIIQKWLKMDENEPSEKYLEVFKDYQRKHPREAGDYSVYEFLSKKENHFIWRNHPEYPYLYATFCEIDKKKKDAKQQATFTLADPINHPLWVRFEERSGSNLNKYRILTEQLHTEKLKKKLTVQLDRLIYPTESGGWEEKGKVDIVLLPSRQFYNQIFLDIEEKGKHAFTYKDESIKFPLKGTLGGARVQFDRDHLRRYPHKVESGNVGRIYFNMTVNIEPTESPVSKSLKIHRDDFPKVVNFKPKELTEWIKDSKGKKLKSGIESLEIGLRVMSIDLGQRQAAAASIFEVVDQKPDIEGKLFFPIKGTELYAVHRASFNIKLPGETLVKSREVLRKAREDNLKLMNQKLNFLRNVLHFQQFEDITEREKRVTKWISRQENSDVPLVYQDELIQIRELMYKPYKDWVAFLKQLHKRLEVEIGKEVKHWRKSLSDGRKGLYGISLKNIDEIDRTRKFLLRWSLRPTEPGEVRRLEPGQRFAIDQLNHLNALKEDRLKKMANTIIMHALGYCYDVRKKKWQAKNPACQIILFEDLSNYNPYEERSRFENSKLMKWSRREIPRQVALQGEIYGLQVGEVGAQFSSRFHAKTGSPGIRCSVVTKEKLQDNRFFKNLQREGRLTLDKIAVLKEGDLYPDKGGEKFISLSKDRKCVTTHADINAAQNLQKRFWTRTHGFYKVYCKAYQVDGQTVYIPESKDQKQKIIEEFGEGYFILKDGVYEWVNAGKLKIKKGSSKQSSSELVDSDILKDSFDLASELKGEKLMLYRDPSGNVFPSDKWMAAGVFFGKLERILISKLTNQYSISTIEDDSSKQSM

SEQ ID NO: 111 - protein, 1307 aa, Unknown
  Acidaminococcus sp. (strain BV3L6)
MTQFEGFTNLYQVSKTLRFELIPQGKTLKHIQEQGFIEEDKARNDHYKELKPIIDRIYKTYADQCLQLVQLDWENLSAAIDSYRKEKTEETRNALIEEQATYRNAIHDYFIGRTDNLTDAINKRHAEIYKGLFKAELFNGKVLKQLGTVTTTEHENALLRSFDKFTTYFSGFYENRKNVFSAEDISTAIPHRIVQDNFPKFKENCHIFTRLITAVPSLREHFENVKKAIGIFVSTSIEEVFSFPFYNQLLTQTQIDLYNQLLGGISREAGTEKIKGLNEVLNLAIQKNDETAHIIASLPHRFIPLFKQILSDRNTLSFILEEFKSDEEVIQSFCKYKTLLRNENVLETAEALFNELNSIDLTHIFISHKKLETISSALCDHWDTLRNALYERRISELTGKITKSAKEKVQRSLKHEDINLQEIISAAGKELSEAFKQKTSEILSHAHAALDQPLPTTLKKQEEKEILKSQLDSLLGLYHLLDWFAVDESNEVDPEFSARLTGIKLEMEPSLSFYNKARNYATKKPYSVEKFKLNFQMPTLASGWDVNKEKNNGAILFVKNGLYYLGIMPKQKGRYKALSFEPTEKTSEGFDKMYYDYFPDAAKMIPKCSTQLKAVTAHFQTHTTPILLSNNFIEPLEITKEIYDLNNPEKEPKKFQTAYAKKTGDQKGYREALCKWIDFTRDFLSKYTKTTSIDLSSLRPSSQYKDLGEYYAELNPLLYHISFQRIAEKEIMDAVETGKLYLFQIYNKDFAKGHHGKPNLHTLYWTGLFSPENLAKTSIKLNGQAELFYRPKSRMKRMAHRLGEKMLNKKLKDQKTPIPDTLYQELYDYVNHRLSHDLSDEARALLPNVITKEVSHEIIKDRRFTSDKFFFHVPITLNYQAANSPSKFNQRVNAYLKEHPETPIIGIDRGERNLIYITVIDSTGKILEQRSLNTIQQFDYQKKLDNREKERVAARQAWSVVGTIKDLKQGYLSQVIHEIVDLMIHYQAVVVLENLNFGFKSKRTGIAEKAVYQQFEKMLIDKLNCLVLKDYPAEKVGGVLNPYQLTDQFTSFAKMGTQSGFLFYVPAPYTSKIDPLTGFVDPFVWKTIKNHESRKHFLEGFDFLHYDVKTGDFILHFKMNRNLSFQRGLPGFMPAWDIVFEKNETQFDAKGTPFIAGKRIVPVIENHRFTGRYRDLYPANELIALLEEKGIVFRDGSNILPKLLENDDSHAIDTMVALIRSVLQMRNSNAATGEDYINSPVRDLNGVCFDSRFQNPEWPMDADANGAYHIALKGQLLLNHLKESKDLKLQNGISNQDWLAYIQELRN

SEQ ID NO: 112 - protein, 1307 aa, Artificial Sequence
  Synthetic polypeptide
MTQFEGFTNLYQVSKTLRFELIPQGKTLKHIQEQGFIEEDKARNDHYKELKPIIDRIYKTYADQCLQLVQLDWENLSAAIDSYRKEKTEETRNALIEEQATYRNAIHDYFIGRTDNLTDAINKRHAEIYKGLFKAELFNGKVLKQLGTVTTTEHENALLRSFDKFTTYFSGFYENRKNVFSAEDISTAIPHRIVQDNFPKFKENCHIFTRLITAVPSLREHFENVKKAIGIFVSTSIEEVFSFPFYNQLLTQTQIDLYNQLLGGISREAGTEKIKGLNEVLNLAIQKNDETAHIIASLPHRFIPLFKQILSDRNTLSFILEEFKSDEEVIQSFCKYKTLLRNENVLETAEALFNELNSIDLTHIFISHKKLETISSALCDHWDTLRNALYERRISELTGKITKSAKEKVQRSLKHEDINLQEIISAAGKELSEAFKQKTSEILSHAHAALDQPLPTTLKKQEEKEILKSQLDSLLGLYHLLDWFAVDESNEVDPEFSARLTGIKLEMEPSLSFYNKARNYATKKPYSVEKFKLNFQMPTLASGWDVNKEKNNGAILFVKNGLYYLGIMPKQKGRYKALSFEPTEKTSEGFDKMYYDYFPDAAKMIPKCSTQLKAVTAHFQTHTTPILLSNNFIEPLEITKEIYDLNNPEKEPKKFQTAYAKKTGDQKGYREALCKWIDFTRDFLSKYTKTTSIDLSSLRPSSQYKDLGEYYAELNPLLYHISFQRIAEKEIMDAVETGKLYLFQIYNKDFAKGHHGKPNLHTLYWTGLFSPENLAKTSIKLNGQAELFYRPKSRMKRMAHRLGEKMLNKKLKDQKTPIPDTLYQELYDYVNHRLSHDLSDEARALLPNVITKEVSHEIIKDRRFTSDKFFFHVPITLNYQAANSPSKFNQRVNAYLKEHPETPIIGIDRGERNLIYITVIDSTGKILEQRSLNTIQQFDYQKKLDNREKERVAARQAWSVVGTIKDLKQGYLSQVIHEIVDLMIHYQAVVVLENLNFGFKSKRTGIAEKAVYQQFEKMLIDKLNCLVLKDYPAEKVGGVLNPYQLTDQFTSFAKMGTQSGFLFYVPAPYTSKIDPLTGFVDPFVWKTIKNHESRKHFLEGFDFLHYDVKTGDFILHFKMNRNLSFQRGLPGFMPAWDIVFEKNETQFDAKGTPFIAGKRIVPVIENHRFTGRYRDLYPANELIALLEEKGIVFRDGSNILPKLLENDDSHAIDTMVALIRSVLQMANSNAATGEDYINSPVRDLNGVCFDSRFQNPEWPMDADANGAYHIALKGQLLLNHLKESKDLKLQNGISNQDWLAYIQELRN

SEQ ID NO: 113 - protein, 1259 aa, Lachnospiraceae bacterium
MNYKTGLEDFIGKESLSKTLRNALIPTESTKIHMEEMGVIRDDELRAEKQQELKEIMDDYYRTFIEEKLGQIQGIQWNSLFQKMEETMEDISVRKDLDKIQNEKRKEICCYFTSDKRFKDLFNAKLITDILPNFIKDNKEYTEEEKAEKEQTRVLFQRFATAFTNYFNQRRNNFSEDNISTAISFRIVNENSEIHLQNMRAFQRIEQQYPEEVCGMEEEYKDMLQEWQMKHIYSVDFYDRELTQPGIEYYNGICGKINEHMNQFCQKNRINKNDFRMKKLHKQILCKKSSYYEIPFRFESDQEVYDALNEFIKTMKKKEIIRRCVHLGQECDDYDLGKIYISSNKYEQISNALYGSWDTIRKCIKEEYMDALPGKGEKKEEKAEAAAKKEEYRSIADIDKIISLYGSEMDRTISAKKCITEICDMAGQISIDPLVCNSDIKLLQNKEKTTEIKTILDSFLHVYQWGQTFIVSDIIEKDSYFYSELEDVLEDFEGITTLYNHVRSYVTQKPYSTVKFKLHFGSPTLANGWSQSKEYDNNAILLMRDQKFYLGIFNVRNKPDKQIIKGHEKEEKGDYKKMIYNLLPGPSKMLPKVFITSRSGQETYKPSKHILDGYNEKRHIKSSPKFDLGYCWDLIDYYKECIHKHPDWKNYDFHFSDTKDYEDISGFYREVEMQGYQIKWTYISADEIQKLDEKGQIFLFQIYNKDFSVHSTGKDNLHTMYLKNLFSEENLKDIVLKLNGEAELFFRKASIKTPIVHKKGSVLVNRSYTQTVGNKEIRVSIPEEYYTEIYNYLNHIGKGKLSSEAQRYLDEGKIKSFTATKDIVKNYRYCCDHYFLHLPITINFKAKSDVAVNERTLAYIAKKEDIHIIGIDRGERNLLYISVVDVHGNIREQRSFNIVNGYDYQQKLKDREKSRDAARKNWEEIEKIKELKEGYLSMVIHYIAQLVVKYNAVVAMEDLNYGFKTGRFKVERQVYQKFETMLIEKLHYLVFKDREVCEEGGVLRGYQLTYIPESLKKVGKQCGFIFYVPAGYTSKIDPTTGFVNLFSFKNLTNRESRQDFVGKFDEIRYDRDKKMFEFSFDYNNYIKKGTILASTKWKVYTNGTRLKRIVVNGKYTSQSMEVELTDAMEKMLQRAGIEYHDGKDLKGQIVEKGIEAEIIDIFRLTVQMRNSRSESEDREYDRLISPVLNDKGEFFDTATADKTLPQDADANGAYCIALKGLYEVKQIKENWKENEQFPRNKLVQDNKTWFDFMQKKRYL

SEQ ID NO: 114 - protein, 1306 aa, Prevotella copri
MAKNFEDFKRLYSLSKTLRFEAKPIGATLDNIVKSGLLDEDEHRAASYVKVKKLIDEYHKVFIDRVLDDGCLPLENKGNNNSLAEYYESYVSRAQDEDAKKKFKEIQQNLRSVIAKKLTEDKAYANLFGNKLIESYKDKEDKKKIIDSDLIQFINTAESTQLDSMSQDEAKELVKEFWGFVTYFYGFFDNRKNMYTAEEKSTGIAYRLVNENLPKFIDNIEAFNRAITRPEIQENMGVLYSDFSEYLNVESIQEMFQLDYYNMLLTQKQIDVYNAIIGGKTDDEHDVKIKGINEYINLYNQQHKDDKLPKLKALFKQILSDRNAISWLPEEFNSDQEVLNAIKDCYERLAENVLGDKVLKSLLGSLADYSLDGIFIRNDLQLTDISQKMFGNWGVIQNAIMQNIKRVAPARKHKESEEDYEKRIAGIFKKADSFSISYINDCLNEADPNNAYFVENYFATFGAVNTPTMQRENLFALVQNAYTEVAALLHSDYPTVKHLAQDKANVSKIKALLDAIKSLQHFVKPLLGKGDESDKDERFYGELASLWAELDTVTPLYNMIRNYMTRKPYSQKKIKLNFENPQLLGGWDANKEKDYATIILRRNGLYYLAIMDKDSRKLLGKAMPSDGECYEKMVYKFFKDVTTMIPKCSTQLKDVQAYFKVNTDDYVLNSKAFNKPLTITKEVFDLNNVLYGKYKKFQKGYLTATGDNVGYTHAVNVWIKFCMDFLNSYDSTCIYDFSSLKPESYLSLDAFYQDANLLLYKLSFARASVSYINQLVEEGKMYLFQIYNKDFSEYSKGTPNMHTLYWKALFDERNLADVVYKLNGQAEMFYRKKSIENTHPTHPANHPILNKNKDNKKKESLFDYDLIKDRRYTVDKFMFHVPITMNFKSVGSENINQDVKAYLRHADDMHIIGIDRGERHLLYLVVIDLQGNIKEQYSLNEIVNEYNGNTYHTNYHDLLDVREEERLKARQSWQTIENIKELKEGYLSQVIHKITQLMVRYHAIVVLEDLSKGFMRSRQKVEKQVYQKFEKMLIDKLNYLVDKKTDVSTPGGLLNAYQLTCKSDSSQKLGKQSGFLFYIPAWNTSKIDPVTGFVNLLDTHSLNSKEKIKAFFSKFDAIRYNKDKKWFEFNLDYDKFGKKAEDTRTKWTLCTRGMRIDTFRNKEKNSQWDNQEVDLTTEMKSLLEHYYIDIHGNLKDAISAQTDKAFFTGLLHILKLTLQMRNSITGTETDYLVSPVADENGIFYDSRSCGNQLPENADANGAYNIARKGLMLIEQIKNAEDLNNVKFDISNKAWLNFAQQKPYKNG

SEQ ID NO: 115 - protein, 1142 aa, Eubacterium rectale
MFSAKLISDILPEFVIHNNNYSASEKEEKTQVIKLFSRFATSFKDYFKNRANCFSANDISSSSCHRIVNDNAEIFFSNALVYRRIVKNLSNDDINKISGDMKDSLKEMSLEEIYSYEKYGEFITQEGISFYNDICGKVNLFMNLYCQKNKENKNLYKLRKLHKQILCIADTSYEVPYKFESDEEVYQSVNGFLDNISSKHIVERLRKIGENYNGYNLDKIYIVSKFYESVSQKTYRDWETINTALEIHYNNILPGNGKSKADKVKKAVKNDLQKSITEINELVSNYKLCPDDNIKAETYIHEISHILNNFEAQELKYNPEIHLVESELKASELKNVLDVIMNAFHWCSVFMTEELVDKDNNFYAELEEIYDEIYPVISLYNLVRNYVTQKPYSTKKIKLNFGIPTLADGWSKSKEYSNNAIILMRDNLYYLGIFNAKNKPDKKIIEGNTSENKGDYKKMIYNLLPGPNKMIPKVFLSSKTGVETYKPSAYILEGYKQNKHLKSSKDFDITFCHDLIDYFKNCIAIHPEWKNFGFDFSDTSTYEDISGFYREVELQGYKIDWTYISEKDIDLLQEKGQLYLFQIYNKDFSKKSSGNDNLHTMYLKNLFSEENLKDIVLKLNGEAEIFFRKSSIKNPIIHKKGSILVNRTYEAEEKDQFGNIQIVRKTIPENIYQELYKYFNDKSDKELSDEAAKLKNVVGHHEAATNIVKDYRYTYDKYFLHMPITINFKANKTSFINDRILQYIAKEKDLHVIGIDRGERNLIYVSVIDTCGNIVEQKSFNIVNGYDYQIKLKQQEGARQIARKEWKEIGKIKEIKEGYLSLVIHEISKMVIKYNAIIAMEDLSYGFKKGRFKVERQVYQKFETMLINKLNYLVFKDISITENGGLLKGYQLTYIPDKLKNVGHQCGCIFYVPAAYTSKIDPTTGFVNIFKFKDLTVDAKREFIKKFDSIRYDSDKNLFCFTFDYNNFITQNTVMSKSSWSVYTYGVRIKRRFVNGRFSNESDTIDITKDMEKTLEMTDINWRDGHDLRQDIIDYEIVQHIFEIFKLTVQMRNSLSELEDRDYDRLISPVLNENNIFYDSAKAGDALPKDADANGAYCIALKGLYEIKQITENWKEDGKFSRDKLKISNKDWFDFIQNKRYL

SEQ ID NO: 116 - protein, 1259 aa, Unknown
  Clostridium sp. AF34-10BH
MNYKTGLEDFIGKESLSKTLRNALIPTESTKIHMEEMGVIRDDELRAEKQQELKEIMDDYYRAFIEEKLGQIQGIQWNSLFQKMEETMEDISVRKDLDKIQNEKRKEICCYFTSDKRFKDLFNAKLITDILPNFIKDNKEYTEEEKAEKEQTRVLFQRFATAFTNYFNQRRNNFSEDNISTAISFRIVNENSEIHLQNMRAFQRIEQQYPEEVCGMEEEYKDMLQEWQMKHIYLVDFYDRVLTQPGIEYYNGICGKINEHMNQFCQKNRINKNDFRMKKLHKQILCKKSSYYEIPFRFESDQEVYDALNEFIKTMKEKEIICRCVHLGQKCDDYDLGKIYISSNKYEQISNALYGSWDTIRKCIKEEYMDALPGKGEKKEEKAEAAAKKEEYRSIADIDKIISLYGSEMDRTISAKKCITEICDMAGQISTDPLVCNSDIKLLQNKEKTTEIKTILDSFLHVYQWGQTFIVSDIIEKDSYFYSELEDVLEDFEGITTLYNHVRSYVTQKPYSTVKFKLHFGSPTLANGWSQSKEYDNNAILLMRDQKFYLGIFNVRNKPDKQIIKGHEKEEKGDYKKMIYNLLPGPSKMLPKVFITSRSGQETYKPSKHILDGYNEKRHIKSSPKFDLGYCWDLIDYYKECIHKHPDWKNYDFHFSDTKDYEDISGFYREVEMQGYQIKWTYISADEIQKLDEKGQIFLFQIYNKDFSVHSTGKDNLHTMYLKNLFSEENLKDIVLKLNGEAELFFRKASIKTPVVHKKGSVLVNRSYTQTVGDKEIRVSIPEEYYTEIYNYLNHIGRGKLSTEAQRYLEERKIKSFTATKDIVKNYRYCCDHYFLHLPITINFKAKSDIAVNERTLAYIAKKEDIHIIGIDRGERNLLYISVVDVHGNIREQRSFNIVNGYDYQQKLKDREKSRDAARKNWEEIEKIKELKEGYLSMVIHYIAQLVVKYNAVVAMEDLNYGFKTGRFKVERQVYQKFETMLIEKLHYLVFKDREVCEEGGVLRGYQLTYIPESLKKVGKQCGFIFYVPAGYTSKIDPTTGFVNLFSFKNLTNRESRQDFVGKFDEIRYDRDKKMFEFSFDYNNYIKKGTMLASTKWKVYTNGTRLKRIVVNGKYTSQSMEVELTDAMEKMLQRAGIEYHDGKDLKGQIVEKGIEAEIIDIFRLTVQMRNSRSESEDREYDRLISPVLNDKGEFFDTATADKTLPQDADANGAYCIALKGLYEVKQIKENWKENEQFPRNKLVQDNKTWFDFMQKKRYL

SEQ ID NO: 117 - protein, 1108 aa, Bacillus hisashii; identical to SEQ ID NO: 110

SEQ ID NO: 118 - protein, 1465 aa, Thermomonas hydrothermalis
MSEKTTQRAYTLRLNRASGECAVCQNNSCDCWHDALWATHKAVNRGAKAFGDWLLTLRGGLCHTLVEMEVPAKGNNPPQRPTDQERRDRRVLLALSWLSVEDEHGAPKEFIVATGRDSADDRAKKVEEKLREILEKRDFQEHEIDAWLQDCGPSLKAHIREDAVWVNRRALFDAAVERIKTLTWEEAWDFLEPFFGTQYFAGIGDGKDKDDAEGPARQGEKAKDLVQKAGQWLSARFGIGTGADFMSMAEAYEKIAKWASQAQNGDNGKATIEKLACALRPSEPPTLDTVLKCISGPGHKSATREYLKTLDKKSTVTQEDLNQLRKLADEDARNCRKKVGKKGKKPWADEVLKDVENSCELTYLQDNSPARHREFSVMLDHAARRVSMAHSWIKKAEQRRRQFESDAQKLKNLQERAPSAVEWLDRFCESRSMTTGANTGSGYRIRKRAIEGWSYVVQAWAEASCDTEDKRIAAARKVQADPEIEKFGDIQLFEALAADEAICVWRDQEGTQNPSILIDYVTGKTAEHNQKRFKVPAYRHPDELRHPVFCDFGNSRWSIQFAIHKEIRDRDKGAKQDTRQLQNRHGLKMRLWNGRSMTDVNLHWSSKRLTADLALDQNPNPNPTEVTRADRLGRAASSAFDHVKIKNVFNEKEWNGRLQAPRAELDRIAKLEEQGKTEQAEKLRKRLRWYVSFSPCLSPSGPFIVYAGQHNIQPKRSGQYAPHAQANKGRARLAQLILSRLPDLRILSVDLGHRFAAACAVWETLSSDAFRREIQGLNVLAGGSGEGDLFLHVEMTGDDGKRRTVVYRRIGPDQLLDNTPHPAPWARLDRQFLIKLQGEDEGVREASNEELWTVHKLEVEVGRTVPLIDRMVRSGFGKTEKQKERLKKLRELGWISAMPNEPSAETDEKEGEIRSISRSVDELMSSALGTLRLALKRHGNRARIAFAMTADYKPMPGGQKYYFHEAKEASKNDDETKRRDNQIEFLQDALSLWHDLFSSPDWEDNEAKKLWQNHIATLPNYQTPEEISAELKRVERNKKRKENRDKLRTAAKALAENDQLRQHLHDTWKERWESDDQQWKERLRSLKDWIFPRGKAEDNPSIRHVGGLSITRINTISGLYQILKAFKMRPEPDDLRKNIPQKGDDELENFNRRLLEARDRLREQRVKQLASRIIEAALGVGRIKIPKNGKLPKRPRTTVDTPCHAVVIESLKTYRPDDLRTRRENRQLMQWSSAKVRKYLKEGCELYGLHFLEVPANYTSRQCSRTGLPGIRCDDVPTGDFLKAPWWRRAINTAREKNGGDAKDRFLVDLYDHLNNLQSKGEALPATVRVPRQGGNLFIAGAQLDDTNKERRAIQADLNAAANIGLRALLDPDWRGRWWYVPCKDGTSEPALDRIEGSTAFNDVRSLPTGDNSSRRAPREIENLWRDPSGDSLESGTWSPTRAYWDTVQSRVIELLRRHAGLPTS

SEQ ID NO: 119 - protein, 1090 aa, Laceyella sacchari
MSIRSFKLKLKTKSGVNAEQLRRGLWRTHQLINDGIAYYMNWLVLLRQEDLFIRNKETNEIEKRSKEEIQAVLLERVHKQQQRNQWSGEVDEQTLLQALRQLYEEIVPSVIGKSGNASLKARFFLGPLVDPNNKTTKDVSKSGPTPKWKKMKDAGDPNWVQEYEKYMAERQTLVRLEEMGLIPLFPMYTDEVGDIHWLPQASGYTRTWDRDMFQQAIERLLSWESWNRRVRERRAQFEKKTHDFASRFSESDVQWMNKLREYEAQQEKSLEENAFAPNEPYALTKKALRGWERVYHSWMRLDSAASEEAYWQEVATCQTAMRGEFGDPAIYQFLAQKENHDIWRGYPERVIDFAELNHLQRELRRAKEDATFTLPDSVDHPLWVRYEAPGGTNIHGYDLVQDTKRNLTLILDKFILPDENGSWHEVKKVPFSLAKSKQFHRQVWLQEEQKQKKREVVFYDYSTNLPHLGTLAGAKLQWDRNFLNKRTQQQIEETGEIGKVFFNISVDVRPAVEVKNGRLQNGLGKALTVLTHPDGTKIVTGWKAEQLEKWVGESGRVSSLGLDSLSEGLRVMSIDLGQRTSATVSVFEITKEAPDNPYKFFYQLEGTEMFAVHQRSFLLALPGENPPQKIKQMREIRWKERNRIKQQVDQLSAILRLHKKVNEDERIQAIDKLLQKVASWQLNEEIATAWNQALSQLYSKAKENDLQWNQAIKNAHHQLEPVVGKQISLWRKDLSTGRQGIAGLSLWSIEELEATKKLLTRWSKRSREPGVVKRIERFETFAKQIQHHINQVKENRLKQLANLIVMTALGYKYDQEQKKWIEVYPACQVVLFENLRSYRFSFERSRRENKKLMEWSHRSIPKLVQMQGELFGLQVADVYAAYSSRYHGRTGAPGIRCHALTEADLRNETNIIHELIEAGFIKEEHRPYLQQGDLVPWSGGELFATLQKPYDNPRILTLHADINAAQNIQKRFWHPSMWFRVNCESVMEGEIVTYVPKNKTVHKKQGKTFRFVKVEGSDVYEWAKWSKNRNKNTFSSITERKPPSSMILFRDPSGTFFKEQEWVEQKTFWGKVQSMIQAYMKKTIVQRMEE

SEQ ID NO: 120 - protein, 1194 aa, Dsulfonatronum thiodismutans
MVLGRKDDTAELRRALWTTHEHVNLAVAEVERVLLRCRGRSYWTLDRRGDPVHVPESQVAEDALAMAREAQRRNGWPVVGEDEEILLALRYLYEQIVPSCLLDDLGKPLKGDAQKIGTNYAGPLFDSDTCRRDEGKDVACCGPFHEVAGKYLGALPEWATPISKQEFDGKDASHLRFKATGGDDAFFRVSIEKANAWYEDPANQDALKNKAYNKDDWKKEKDKGISSWAVKYIQKQLQLGQDPRTEVRRKLWLELGLLPLFIPVFDKTMVGNLWNRLAVRLALAHLLSWESWNHRAVQDQALARAKRDELAALFLGMEDGFAGLREYELRRNESIKQHAFEPVDRPYVVSGRALRSWTRVREEWLRHGDTQESRKNICNRLQDRLRGKFGDPDVFHWLAEDGQEALWKERDCVTSFSLLNDADGLLEKRKGYALMTFADARLHPRWAMYEAPGGSNLRTYQIRKTENGLWADVVLLSPRNESAAVEEKTFNVRLAPSGQLSNVSFDQIQKGSKMVGRCRYQSANQQFEGLLGGAEILFDRKRIANEQHGATDLASKPGHVWFKLTLDVRPQAPQGWLDGKGRPALPPEAKHFKTALSNKSKFADQVRPGLRVLSVDLGVRSFAACSVFELVRGGPDQGTYFPAADGRTVDDPEKLWAKHERSFKITLPGENPSRKEEIARRAAMEELRSLNGDIRRLKAILRLSVLQEDDPRTEHLRLFMEAIVDDPAKSALNAELFKGFGDDRFRSTPDLWKQHCHFFHDKAEKVVAERFSRWRTETRPKSSSWQDWRERRGYAGGKSYWAVTYLEAVRGLILRWNMRGRTYGEVNRQDKKQFGTVASALLHHINQLKEDRIKTGADMIIQAARGFVPRKNGAGWVQVHEPCRLILFEDLARYRFRTDRSRRENSRLMRWSHREIVNEVGMQGELYGLHVDTTEAGFSSRYLASSGAPGVRCRHLVEEDFHDGLPGMHLVGELDWLLPKDKDRTANEARRLLGGMVRPGMLVPWDGGELFATLNAASQLHVIHADINAAQNLQRRFWGRCGEAIRIVCNQLSVDGSTRYEMAKAPKARLLGALQQLKNGDAPFHLTSIPNSQKPENSYVMTPTNAGKKYRAGPGEKSSGEEDELALDIVEQAEELAQGRKTFFRDPSGVFFAPDRWLPSEIYWSRIRRRIWQVTLERNSSGRQERAEMDEMPY

SEQ ID NO: 121 - protein, 1368 aa, Artificial Sequence
  Synthetic polypeptide
MDKKYSIGLDIGTNSVGWAVITDEYKVPSKKFKVLGNTDRHSIKKNLIGALLFDSGETAEATRLKRTARRRYTRRKNRICYLQEIFSNEMAKVDDSFFHRLEESFLVEEDKKHERHPIFGNIVDEVAYHEKYPTIYHLRKKLVDSTDKADLRLIYLALAHMIKFRGHFLIEGDLNPDNSDVDKLFIQLVQTYNQLFEENPINASGVDAKAILSARLSKSRRLENLIAQLPGEKKNGLFGNLIALSLGLTPNFKSNFDLAEDAKLQLSKDTYDDDLDNLLAQIGDQYADLFLAAKNLSDAILLSDILRVNTEITKAPLSASMVKRYDEHHQDLTLLKALVRQQLPEKYKEIFFDQSKNGYAGYIDGGASQEEFYKFIKPILEKMDGTEELLVKLNREDLLRKQRTFDNGIIPHQIHLGELHAILRRQGDFYPFLKDNREKIEKILTFRIPYYVGPLARGNSRFAWMTRKSEETITPWNFEEVVDKGASAQSFIERMTNFDKNLPNEKVLPKHSLLYEYFTVYNELTKVKYVTEGMRKPAFLSGEQKKAIVDLLFKTNRKVTVKQLKEDYFKKIECFDSVEISGVEDRFNASLGTYHDLLKIIKDKDFLDNEENEDILEDIVLTLTLFEDREMIEERLKTYAHLFDDKVMKQLKRLRYTGWGRLSRKLINGIRDKQSGKTILDFLKSDGFANRNFMQLIHDDSLTFKEDIQKAQVSGQGDSLHEHIANLAGSPAIKKGILQTVKVVDELVKVMGGHKPENIVIEMARENQTTQKGQKNSRERMKRIEEGIKELGSQILKEHPVENTQLQNEKLYLYYLQNGRDMYVDQELDINRLSDYDVDHIVPQSFLKDDSIDNKVLTRSDKNRGKSDNVPSEEVVKKMKNYWRQLLNAKLITQRKFDNLTKAERGGLSELDKAGFIKRQLVETRQITKHVAQILDSRMNTKYDENDKLIREVKVITLKSKLVSDFRKDFQFYKVREINNYHHAHDAYLNAVVGTALIKKYPKLESEFVYGDYKVYDVRKMIAKSEQEIGKATAKYFFYSNIMNFFKTEITLANGEIRKRPLIETNGETGEIVWDKGRDFATVRKVLSMPQVNIVKKTEVQTGGFSKESILPKGNSDKLIARKKDWDPKKYGGFNSPTAAYSVLVVAKVEKGKSKKLKSVKELLGITIMERSSFEKNPIGFLEAKGYKEVKKDLIIKLPKYSLFELENGRKRMLASAGVLHKGNELALPSKYVNFLYLASHYEKLKGSPEDNEQKQLFVEQHKHYLDEIIEQISEFSKRVILADANLDKVLSAYNKHRDKPIREQAENIIHLFTLTNLGVPAAFKYFDTTIDKKRYTSTKEVLDATLIHQSITGLYETRIDLSQLGGD

SEQ ID NO: 122 - protein, 1368 aa, Artificial Sequence
  Synthetic polypeptide
MDKKYSIGLDIGTNSVGWAVITDEYKVPSKKFKVLGNTDRHSIKKNLIGALLFDSGETAEATRLKRTARRRYTRRKNRICYLQEIFSNEMAKVDDSFFHRLEESFLVEEDKKHERHPIFGNIVDEVAYHEKYPTIYHLRKKLVDSTDKADLRLIYLALAHMIKFRGHFLIEGDLNPDNSDVDKLFIQLVQTYNQLFEENPINASGVDAKAILSARLSKSRRLENLIAQLPGEKKNGLFGNLIALSLGLTPNFKSNFDLAEDAKLQLSKDTYDDDLDNLLAQIGDQYADLFLAAKNLSDAILLSDILRVNTEITKAPLSASMVKRYDEHHQDLTLLKALVRQQLPEKYKEIFFDQSKNGYAGYIDGGASQEEFYKFIKPILEKMDGTEELLVKLNREDLLRKQRTFDNGIIPHQIHLGELHAILRRQGDFYPFLKDNREKIEKILTFRIPYYVGPLARGNSRFAWMTRKSEETITPWNFEEVVDKGASAQSFIERMTNFDKNLPNEKVLPKHSLLYEYFTVYNELTKVKYVTEGMRKPAFLSGEQKKAIVDLLFKTNRKVTVKQLKEDYFKKIECFDSVEISGVEDRFNASLGTYHDLLKIIKDKDFLDNEENEDILEDIVLTLTLFEDREMIEERLKTYAHLFDDKVMKQLKRLRYTGWGRLSRKLINGIRDKQSGKTILDFLKSDGFANRNFMQLIHDDSLTFKEDIQKAQVSGQGDSLHEHIANLAGSPAIKKGILQTVKVVDELVKVMGGHKPENIVIEMARENQTTQKGQKNSRERMKRIEEGIKELGSQILKEHPVENTQLQNEKLYLYYLQNGRDMYVDQELDINRLSDYDVDHIVPQSFLKDDSIDNKVLTRSDKNRGKSDNVPSEEVVKKMKNYWRQLLNAKLITQRKFDNLTKAERGGLSELDKAGFIKRQLVETRQITKHVAQILDSRMNTKYDENDKLIREVKVITLKSKLVSDFRKDFQFYKVREINNYHHAHDAYLNAVVGTALIKKYPKLESEFVYGDYKVYDVRKMIAKSEQEIGKATAKYFFYSNIMNFFKTEITLANGEIRKRPLIETNGETGEIVWDKGRDFATVRKVLSMPQVNIVKKTEVQTGGFSKESILPKGNSDKLIARKKDWDPKKYGGFNSPTVAYSVLVVAKVEKGKSKKLKSVKELLGITIMERSSFEKNPIDFLEAKGYKEVKKDLIIKLPKYSLFELENGRKRMLASAGVLQKGNELALPSKYVNFLYLASHYEKLKGSPEDNEQKQLFVEQHKHYLDEIIEQISEFSKRVILADANLDKVLSAYNKHRDKPIREQAENIIHLFTLTNLGAPAAFKYFDTTINRKQYNTTKEVLDATLIRQSITGLYETRIDLSQLGGD

SEQ ID NO: 123 - protein, 1368 aa, Artificial Sequence
  Synthetic polypeptide
MDKKYSIGLDIGTNSVGWAVITDEYKVPSKKFKVLGNTDRHSIKKNLIGALLFDSGETAEATRLKRTARRRYTRRKNRICYLQEIFSNEMAKVDDSFFHRLEESFLVEEDKKHERHPIFGNIVDEVAYHEKYPTIYHLRKKLVDSTDKADLRLIYLALAHMIKFRGHFLIEGDLNPDNSDVDKLFIQLVQTYNQLFEENPINASGVDAKAILSARLSKSRRLENLIAQLPGEKKNGLFGNLIALSLGLTPNFKSNFDLAEDAKLQLSKDTYDDDLDNLLAQIGDQYADLFLAAKNLSDAILLSDILRVNTEITKAPLSASMVKRYDEHHQDLTLLKALVRQQLPEKYKEIFFDQSKNGYAGYIDGGASQEEFYKFIKPILEKMDGTEELLVKLNREDLLRKQRTFDNGIIPHQIHLGELHAILRRQGDFYPFLKDNREKIEKILTFRIPYYVGPLARGNSRFAWMTRKSEETITPWNFEEVVDKGASAQSFIERMTNFDKNLPNEKVLPKHSLLYEYFTVYNELTKVKYVTEGMRKPAFLSGEQKKAIVDLLFKTNRKVTVKQLKEDYFKKIECFDSVEISGVEDRFNASLGTYHDLLKIIKDKDFLDNEENEDILEDIVLTLTLFEDREMIEERLKTYAHLFDDKVMKQLKRLRYTGWGRLSRKLINGIRDKQSGKTILDFLKSDGFANRNFMQLIHDDSLTFKEDIQKAQVSGQGDSLHEHIANLAGSPAIKKGILQTVKVVDELVKVMGGHKPENIVIEMARENQTTQKGQKNSRERMKRIEEGIKELGSQILKEHPVENTQLQNEKLYLYYLQNGRDMYVDQELDINRLSDYDVDHIVPQSFLKDDSIDNKVLTRSDKNRGKSDNVPSEEVVKKMKNYWRQLLNAKLITQRKFDNLTKAERGGLSELDKAGFIKRQLVETRQITKHVAQILDSRMNTKYDENDKLIREVKVITLKSKLVSDFRKDFQFYKVREINNYHHAHDAYLNAVVGTALIKKYPKLESEFVYGDYKVYDVRKMIAKSEQEIGKATAKYFFYSNIMNFFKTEITLANGEIRKRPLIETNGETGEIVWDKGRDFATVRKVLSMPQVNIVKKTEVQTGGFSKESILPKGNSDKLIARKKDWDPKKYGGFNSPTVAYSVLVVAKVEKGKSKKLKSVKELLGITIMERSSFEKNPIGFLEAKGYKEVKKDLIIKLPKYSLFELENGRKRMLASASVLHKGNELALPSKYVNFLYLASHYEKLKGSSEDNKQKQLFVEQHKHYLDEIIEQISEFSKRVILADANLDKVLSAYNKHRDKPIREQAENIIHLFTLTNLGASAAFKYFDTTIGRKLYTSTKEVLDATLIHQSITGLYETRIDLSQLGGD

SEQ ID NO: 124 - protein, 1359 aa, Artificial Sequence
  Synthetic polypeptide
DKKYSIGLDIGTNSVGWAVITDEYKVPSKKFKVLGNTDRHSIKKNLIGALLFDSGETAEATRLKRTARRRYTRRKNRICYLQEIFSNEMAKVDDSFFHRLEESFLVEEDKKHERHPIFGNIVDEVAYHEKYPTIYHLRKKLVDSTDKADLRLIYLALAHMIKFRGHFLIEGDLNPDNSDVDKLFIQLVQTYNQLFEENPINASGVDAKAILSARLSKSRKLENLIAQLPGEKKNGLFGNLIALSLGLTPNFKSNFDLAEDAKLQLSKDTYDDDLDNLLAQIGDQYADLFLAAKNLSDAILLSDILRVNTEITKAPLSASMIKRYDEHHQDLTLLKALVRQQLPEKYKEIFFDQSKNGYAGYIDGGASQEEFYKFIKPILEKMDGTEELLVKLKREDLLRKQRTFDNGSIPHQIHLGELHAILRRQEDFYPFLKDNREKIEKILTFRIPYYVGPLARGNSRFAWMTRKSEETITPWNFEEVVDKGASAQSFIERMTNFDKNLPNEKVLPKHSLLYEYFTVYNELTKVKYVTEGMRKPAFLSGEQKKAIVDLLFKTNRKVTVKQLKEDYFKKIECFDSVEISGVEDRFNASLGTYHDLLKIIKDKDFLDNEENEDILEDIVLTLTLFEDREMIEERLKTYAHLFDDKVMKQLKRRRYTGWGRLSRKLINGIRDKQSGKTILDFLKSDGFANRNFMQLIHDDSLTFKEDIQKAQVSGQGDSLHEHIANLAGSPAIKKGILQTVKVVDELVKVMGRHKPENIVIEMARENQTTQKGQKNSRERMKRIEEGIKELGSQILKEHPVENTQLQNEKLYLYYLQNGRDMYVDQELDINRLSDYDVDHIVPQSFLKDDSIDNKVLTRSDKNRGKSDNVPSEEVVKKMKNYWRQLLNAKLITQRKFDNLTKAERGGLSELDKAGFIKRQLVETRQITKHVAQILDSRMNTKYDENDKLIREVKVITLKSKLVSDFRKDFQFYKVREINNYHHAHDAYLNAVVGTALIKKYPKLESEFVYGDYKVYDVRKMIAKSEQEIGKATAKYFFYSNIMNFFKTEITLANGEIRKRPLIETNGETGEIVWDKGRDFATVRKVLSMPQVNIVKKTEIQTVGQNGGLFDDNPKSPLEVTPSKLVPLKKELNPKKYGGYQKPTTAYPVLLITDTKQLIPISVMNKKQFEQNPVKFLRDRGYQQVGKNDFIKLPKYTLVDIGDGIKRLWASSKEIHKGNQLVVSKKSQILLYHAHHLDSDLSNDYLQNHNQQFDVLFNEIISFSKKCKLGKEHIQKIENVYSNKKNSASIEELAESFIKLLGFTQLGATSPFNFLGVKLNQKQYKGKKDYILPCTEGTLIRQSITGLYETRVDLSKIGED

SEQ ID NO: 125 - protein, 1300 aa, Francisella novicida
MSIYQEFVNKYSLSKTLRFELIPQGKTLENIKARGLILDDEKRAKDYKKAKQIIDKYHQFFIEEILSSVCISEDLLQNYSDVYFKLKKSDDDNLQKDFKSAKDTIKKQISEYIKDSEKFKNLFNQNLIDAKKGQESDLILWLKQSKDNGIELFKANSDITDIDEALEIIKSFKGWTTYFKGFHENRKNVYSSNDIPTSIIYRIVDDNLPKFLENKAKYESLKDKAPEAINYEQIKKDLAEELTFDIDYKTSEVNQRVFSLDEVFEIANFNNYLNQSGITKFNTIIGGKFVNGENTKRKGINEYINLYSQQINDKTLKKYKMSVLFKQILSDTESKSFVIDKLEDDSDVVTTMQSFYEQIAAFKTVEEKSIKETLSLLFDDLKAQKLDLSKIYFKNDKSLTDLSQQVFDDYSVIGTAVLEYITQQIAPKNLDNPSKKEQELIAKKTEKAKYLSLETIKLALEEFNKHRDIDKQCRFEEILANFAAIPMIFDEIAQNKDNLAQISIKYQNQGKKDLLQASAEDDVKAIKDLLDQTNNLLHKLKIFHISQSEDKANILDKDEHFYLVFEECYFELANIVPLYNKIRNYITQKPYSDEKFKLNFENSTLANGWDKNKEPDNTAILFIKDDKYYLGVMNKKNNKIFDDKAIKENKGEGYKKIVYKLLPGANKMLPKVFFSAKSIKFYNPSEDILRIRNHSTHTKNGSPQKGYEKFEFNIEDCRKFIDFYKQSISKHPEWKDFGFRFSDTQRYNSIDEFYREVENQGYKLTFENISESYIDSVVNQGKLYLFQIYNKDFSAYSKGRPNLHTLYWKALFDERNLQDVVYKLNGEAELFYRKQSIPKKITHPAKEAIANKNKDNPKKESVFEYDLIKDKRFTEDKFFFHCPITINFKSSGANKFNDEINLLLKEKANDVHILSIDRGERHLAYYTLVDGKGNIIKQDTFNIIGNDRMKTNYHDKLAAIEKDRDSARKDWKKINNIKEMKEGYLSQVVHEIAKLVIEYNAIVVFEDLNFGFKRGRFKVEKQVYQKLEKMLIEKLNYLVFKDNEFDKTGGVLRAYQLTAPFETFKKMGKQTGIIYYVPAGFTSKICPVTGFVNQLYPKYESVSKSQEFFSKFDKICYNLDKGYFEFSFDYKNFGDKAAKGKWTIASFGSRLINFRNSDKNHNWDTREVYPTKELEKLLKDYSIEYGHGECIKAAICGESDKKFFAKLTSVLNTILQMRNSKTGTELDYLISPVADVNGNFFDSRQAPKNMPQDADANGAYHIGLKGLMLLGRIKNNQEGKKLNLVIKNEEYFEFVQNRNN

SEQ ID NO: 126 - protein, 1082 aa, Geobacillus thermodenitrificans; identical to SEQ ID NO: 83

SEQ ID NO: 127 - protein, 887 aa, Natronobacterium gregoryi
MTVIDLDSTTTADELTSGHTYDISVTLTGVYDNTDEQHPRMSLAFEQDNGERRYITLWKNTTPKDVFTYDYATGSTYIFTNIDYEVKDGYENLTATYQTTVENATAQEVGTTDEDETFAGGEPLDHHLDDALNETPDDAETESDSGHVMTSFASRDQLPEWTLHTYTLTATDGAKTDTEYARRTLAYTVRQELYTDHDAAPVATDGLMLLTPEPLGETPLDLDCGVRVEADETRTLDYTTAKDRLLARELVEEGLKRSLWDDYLVRGIDEVLSKEPVLTCDEFDLHERYDLSVEVGHSGRAYLHINFRHRFVPKLTLADIDDDNIYPGLRVKTTYRPRRGHIVWGLRDECATDSLNTLGNQSVVAYHRNNQTPINTDLLDAIEAADRRVVETRRQGHGDDAVSFPQELLAVEPNTHQIKQFASDGFHQQARSKTRLSASRCSEKAQAFAERLDPVRLNGSTVEFSSEFFTGNNEQQLRLLYENGESVLTFRDGARGAHPDETFSKGIVNPPESFEVAVVLPEQQADTCKAQWDTMADLLNQAGAPPTRSETVQYDAFSSPESISLNVAGAIDPSEVDAAFVVLPPDQEGFADLASPTETYDELKKALANMGIYSQMAYFDRFRDAKIFYTRNVALGLLAAAGGVAFTTEHAMPGDADMFIGIDVSRSYPEDGASGQINIAATATAVYKDGTILGHSSTRPQLGEKLQSTDVRDIMKNAILGYQQVTGESPTHIVIHRDGFMNEDLDPATEFLNEQGVEYDIVEIRKQPQTRLLAVSDVQYDTPVKSIAAINQNEPRATVATFGAPEYLATRDGGGLPRPIQIERVAGETDIETLTRQVYLLSQSHIQVHNSTARLPITTAYADQASTHATKGYLVQTGAFESNVGFL

SEQ ID NO: 128 - protein, 1387 aa, Artificial Sequence
  Synthetic polypeptide
DYKVYDVRKMIAKSEQEIGKATAKYFFYSNIMNFFKTEITLANGEIRKRPLIETNGETGEIVWDKGRDFATVRKVLSMPQVNIVKKTEVQTGGFSKESILPKRNSDKLIARKKDWDPKKYGGFDSPTVAYSVLVVAKVEKGKSKKLKSVKELLGITIMERSSFEKNPIDFLEAKGYKEVKKDLIIKLPKYSLFELENGRKRMLASAGELQKGNELALPSKYVNFLYLASHYEKLKGSPEDNEQKQLFVEQHKHYLDEIIEQISEFSKRVILADANLDKVLSAYNKHRDKPIREQAENIIHLFTLTNLGAPAAFKYFDTTIDRKRYTSTKEVLDATLIHQSITGLYETRIDLSQLGGDGGSGGSGGSGGSGGSGGSGGDKKYSIGLAIGTNSVGWAVITDEYKVPSKKFKVLGNTDRHSIKKNLIGALLFDSGETAEATRLKRTARRRYTRRKNRICYLQEIFSNEMAKVDDSFFHRLEESFLVEEDKKHERHPIFGNIVDEVAYHEKYPTIYHLRKKLVDSTDKADLRLIYLALAHMIKFRGHFLIEGDLNPDNSDVDKLFIQLVQTYNQLFEENPINASGVDAKAILSARLSKSRRLENLIAQLPGEKKNGLFGNLIALSLGLTPNFKSNFDLAEDAKLQLSKDTYDDDLDNLLAQIGDQYADLFLAAKNLSDAILLSDILRVNTEITKAPLSASMIKRYDEHHQDLTLLKALVRQQLPEKYKEIFFDQSKNGYAGYIDGGASQEEFYKFIKPILEKMDGTEELLVKLNREDLLRKQRTFDNGSIPHQIHLGELHAILRRQEDFYPFLKDNREKIEKILTFRIPYYVGPLARGNSRFAWMTRKSEETITPWNFEEVVDKGASAQSFIERMTNFDKNLPNEKVLPKHSLLYEYFTVYNELTKVKYVTEGMRKPAFLSGEQKKAIVDLLFKTNRKVTVKQLKEDYFKKIECFDSVEISGVEDRFNASLGTYHDLLKIIKDKDFLDNEENEDILEDIVLTLTLFEDREMIEERLKTYAHLFDDKVMKQLKRRRYTGWGRLSRKLINGIRDKQSGKTILDFLKSDGFANRNFMQLIHDDSLTFKEDIQKAQVSGQGDSLHEHIANLAGSPAIKKGILQTVKVVDELVKVMGRHKPENIVIEMARENQTTQKGQKNSRERMKRIEEGIKELGSQILKEHPVENTQLQNEKLYLYYLQNGRDMYVDQELDINRLSDYDVDHIVPQSFLKDDSIDNKVLTRSDKNRGKSDNVPSEEVVKKMKNYWRQLLNAKLITQRKFDNLTKAERGGLSELDKAGFIKRQLVETRQITKHVAQILDSRMNTKYDENDKLIREVKVITLKSKLVSDFRKDFQFYKVREINNYHHAHDAYLNAVVGTALIKKYPKLESEFVYG

SEQ ID NO: 129 - protein, 1388 aa, Artificial Sequence
  Synthetic polypeptide
EIGKATAKYFFYSNIMNFFKTEITLANGEIRKRPLIETNGETGEIVWDKGRDFATVRKVLSMPQVNIVKKTEVQTGGFSKESILPKRNSDKLIARKKDWDPKKYGGFDSPTVAYSVLVVAKVEKGKSKKLKSVKELLGITIMERSSFEKNPIDFLEAKGYKEVKKDLIIKLPKYSLFELENGRKRMLASAGELQKGNELALPSKYVNFLYLASHYEKLKGSPEDNEQKQLFVEQHKHYLDEIIEQISEFSKRVILADANLDKVLSAYNKHRDKPIREQAENIIHLFTLTNLGAPAAFKYFDTTIDRKRYTSTKEVLDATLIHQSITGLYETRIDLSQLGGDGGSGGSGGSGGSGGSGGSGGMDKKYSIGLAIGTNSVGWAVITDEYKVPSKKFKVLGNTDRHSIKKNLIGALLFDSGETAEATRLKRTARRRYTRRKNRICYLQEIFSNEMAKVDDSFFHRLEESFLVEEDKKHERHPIFGNIVDEVAYHEKYPTIYHLRKKLVDSTDKADLRLIYLALAHMIKFRGHFLIEGDLNPDNSDVDKLFIQLVQTYNQLFEENPINASGVDAKAILSARLSKSRRLENLIAQLPGEKKNGLFGNLIALSLGLTPNFKSNFDLAEDAKLQLSKDTYDDDLDNLLAQIGDQYADLFLAAKNLSDAILLSDILRVNTEITKAPLSASMIKRYDEHHQDLTLLKALVRQQLPEKYKEIFFDQSKNGYAGYIDGGASQEEFYKFIKPILEKMDGTEELLVKLNREDLLRKQRTFDNGSIPHQIHLGELHAILRRQEDFYPFLKDNREKIEKILTFRIPYYVGPLARGNSRFAWMTRKSEETITPWNFEEVVDKGASAQSFIERMTNFDKNLPNEKVLPKHSLLYEYFTVYNELTKVKYVTEGMRKPAFLSGEQKKAIVDLLFKTNRKVTVKQLKEDYFKKIECFDSVEISGVEDRFNASLGTYHDLLKIIKDKDFLDNEENEDILEDIVLTLTLFEDREMIEERLKTYAHLFDDKVMKQLKRRRYTGWGRLSRKLINGIRDKQSGKTILDFLKSDGFANRNFMQLIHDDSLTFKEDIQKAQVSGQGDSLHEHIANLAGSPAIKKGILQTVKVVDELVKVMGRHKPENIVIEMARENQTTQKGQKNSRERMKRIEEGIKELGSQILKEHPVENTQLQNEKLYLYYLQNGRDMYVDQELDINRLSDYDVDHIVPQSFLKDDSIDNKVLTRSDKNRGKSDNVPSEEVVKKMKNYWRQLLNAKLITQRKFDNLTKAERGGLSELDKAGFIKRQLVETRQITKHVAQILDSRMNTKYDENDKLIREVKVITLKSKLVSDFRKDFQFYKVREINNYHHAHDAYLNAVVGTALIKKYPKLESEFVYGDYKVYDVRKMIAKSEQ

SEQ ID NO: 130 - protein, 1387 aa, Artificial Sequence
  Synthetic polypeptide
NIMNFFKTEITLANGEIRKRPLIETNGETGEIVWDKGRDFATVRKVLSMPQVNIVKKTEVQTGGFSKESILPKRNSDKLIARKKDWDPKKYGGFDSPTVAYSVLVVAKVEKGKSKKLKSVKELLGITIMERSSFEKNPIDFLEAKGYKEVKKDLIIKLPKYSLFELENGRKRMLASAGELQKGNELALPSKYVNFLYLASHYEKLKGSPEDNEQKQLFVEQHKHYLDEIIEQISEFSKRVILADANLDKVLSAYNKHRDKPIREQAENIIHLFTLTNLGAPAAFKYFDTTIDRKRYTSTKEVLDATLIHQSITGLYETRIDLSQLGGDGGSGGSGGSGGSGGSGGSGGDKKYSIGLAIGTNSVGWAVITDEYKVPSKKFKVLGNTDRHSIKKNLIGALLFDSGETAEATRLKRTARRRYTRRKNRICYLQEIFSNEMAKVDDSFFHRLEESFLVEEDKKHERHPIFGNIVDEVAYHEKYPTIYHLRKKLVDSTDKADLRLIYLALAHMIKFRGHFLIEGDLNPDNSDVDKLFIQLVQTYNQLFEENPINASGVDAKAILSARLSKSRRLENLIAQLPGEKKNGLFGNLIALSLGLTPNFKSNFDLAEDAKLQLSKDTYDDDLDNLLAQIGDQYADLFLAAKNLSDAILLSDILRVNTEITKAPLSASMIKRYDEHHQDLTLLKALVRQQLPEKYKEIFFDQSKNGYAGYIDGGASQEEFYKFIKPILEKMDGTEELLVKLNREDLLRKQRTFDNGSIPHQIHLGELHAILRRQEDFYPFLKDNREKIEKILTFRIPYYVGPLARGNSRFAWMTRKSEETITPWNFEEVVDKGASAQSFIERMTNFDKNLPNEKVLPKHSLLYEYFTVYNELTKVKYVTEGMRKPAFLSGEQKKAIVDLLFKTNRKVTVKQLKEDYFKKIECFDSVEISGVEDRFNASLGTYHDLLKIIKDKDFLDNEENEDILEDIVLTLTLFEDREMIEERLKTYAHLFDDKVMKQLKRRRYTGWGRLSRKLINGIRDKQSGKTILDFLKSDGFANRNFMQLIHDDSLTFKEDIQKAQVSGQGDSLHEHIANLAGSPAIKKGILQTVKVVDELVKVMGRHKPENIVIEMARENQTTQKGQKNSRERMKRIEEGIKELGSQILKEHPVENTQLQNEKLYLYYLQNGRDMYVDQELDINRLSDYDVDHIVPQSFLKDDSIDNKVLTRSDKNRGKSDNVPSEEVVKKMKNYWRQLLNAKLITQRKFDNLTKAERGGLSELDKAGFIKRQLVETRQITKHVAQILDSRMNTKYDENDKLIREVKVITLKSKLVSDFRKDFQFYKVREINNYHHAHDAYLNAVVGTALIKKYPKLESEFVYGDYKVYDVRKMIAKSEQEIGKATAKYFFYS

SEQ ID NO: 131 - protein, 1388 aa, Artificial Sequence
  Synthetic polypeptide
PEDNEQKQLFVEQHKHYLDEIIEQISEFSKRVILADANLDKVLSAYNKHRDKPIREQAENIIHLFTLTNLGAPAAFKYFDTTIDRKRYTSTKEVLDATLIHQSITGLYETRIDLSQLGGDGGSGGSGGSGGSGGSGGSGGMDKKYSIGLAIGTNSVGWAVITDEYKVPSKKFKVLGNTDRHSIKKNLIGALLFDSGETAEATRLKRTARRRYTRRKNRICYLQEIFSNEMAKVDDSFFHRLEESFLVEEDKKHERHPIFGNIVDEVAYHEKYPTIYHLRKKLVDSTDKADLRLIYLALAHMIKFRGHFLIEGDLNPDNSDVDKLFIQLVQTYNQLFEENPINASGVDAKAILSARLSKSRRLENLIAQLPGEKKNGLFGNLIALSLGLTPNFKSNFDLAEDAKLQLSKDTYDDDLDNLLAQIGDQYADLFLAAKNLSDAILLSDILRVNTEITKAPLSASMIKRYDEHHQDLTLLKALVRQQLPEKYKEIFFDQSKNGYAGYIDGGASQEEFYKFIKPILEKMDGTEELLVKLNREDLLRKQRTFDNGSIPHQIHLGELHAILRRQEDFYPFLKDNREKIEKILTFRIPYYVGPLARGNSRFAWMTRKSEETITPWNFEEVVDKGASAQSFIERMTNFDKNLPNEKVLPKHSLLYEYFTVYNELTKVKYVTEGMRKPAFLSGEQKKAIVDLLFKTNRKVTVKQLKEDYFKKIECFDSVEISGVEDRFNASLGTYHDLLKIIKDKDFLDNEENEDILEDIVLTLTLFEDREMIEERLKTYAHLFDDKVMKQLKRRRYTGWGRLSRKLINGIRDKQSGKTILDFLKSDGFANRNFMQLIHDDSLTFKEDIQKAQVSGQGDSLHEHIANLAGSPAIKKGILQTVKVVDELVKVMGRHKPENIVIEMARENQTTQKGQKNSRERMKRIEEGIKELGSQILKEHPVENTQLQNEKLYLYYLQNGRDMYVDQELDINRLSDYDVDHIVPQSFLKDDSIDNKVLTRSDKNRGKSDNVPSEEVVKKMKNYWRQLLNAKLITQRKFDNLTKAERGGLSELDKAGFIKRQLVETRQITKHVAQILDSRMNTKYDENDKLIREVKVITLKSKLVSDFRKDFQFYKVREINNYHHAHDAYLNAVVGTALIKKYPKLESEFVYGDYKVYDVRKMIAKSEQEIGKATAKYFFYSNIMNFFKTEITLANGEIRKRPLIETNGETGEIVWDKGRDFATVRKVLSMPQVNIVKKTEVQTGGFSKESILPKRNSDKLIARKKDWDPKKYGGFDSPTVAYSVLVVAKVEKGKSKKLKSVKELLGITIMERSSFEKNPIDFLEAKGYKEVKKDLIIKLPKYSLFELENGRKRMLASAGELQKGNELALPSKYVNFLYLASHYEKLKGS

SEQ ID NO: 132 - protein, 1387 aa, Artificial Sequence
  Synthetic polypeptide
KPIREQAENIIHLFTLTNLGAPAAFKYFDTTIDRKRYTSTKEVLDATLIHQSITGLYETRIDLSQLGGDGGSGGSGGSGGSGGSGGSGGDKKYSIGLAIGTNSVGWAVITDEYKVPSKKFKVLGNTDRHSIKKNLIGALLFDSGETAEATRLKRTARRRYTRRKNRICYLQEIFSNEMAKVDDSFFHRLEESFLVEEDKKHERHPIFGNIVDEVAYHEKYPTIYHLRKKLVDSTDKADLRLIYLALAHMIKFRGHFLIEGDLNPDNSDVDKLFIQLVQTYNQLFEENPINASGVDAKAILSARLSKSRRLENLIAQLPGEKKNGLFGNLIALSLGLTPNFKSNFDLAEDAKLQLSKDTYDDDLDNLLAQIGDQYADLFLAAKNLSDAILLSDILRVNTEITKAPLSASMIKRYDEHHQDLTLLKALVRQQLPEKYKEIFFDQSKNGYAGYIDGGASQEEFYKFIKPILEKMDGTEELLVKLNREDLLRKQRTFDNGSIPHQIHLGELHAILRRQEDFYPFLKDNREKIEKILTFRIPYYVGPLARGNSRFAWMTRKSEETITPWNFEEVVDKGASAQSFIERMTNFDKNLPNEKVLPKHSLLYEYFTVYNELTKVKYVTEGMRKPAFLSGEQKKAIVDLLFKTNRKVTVKQLKEDYFKKIECFDSVEISGVEDRFNASLGTYHDLLKIIKDKDFLDNEENEDILEDIVLTLTLFEDREMIEERLKTYAHLFDDKVMKQLKRRRYTGWGRLSRKLINGIRDKQSGKTILDFLKSDGFANRNFMQLIHDDSLTFKEDIQKAQVSGQGDSLHEHIANLAGSPAIKKGILQTVKVVDELVKVMGRHKPENIVIEMARENQTTQKGQKNSRERMKRIEEGIKELGSQILKEHPVENTQLQNEKLYLYYLQNGRDMYVDQELDINRLSDYDVDHIVPQSFLKDDSIDNKVLTRSDKNRGKSDNVPSEEVVKKMKNYWRQLLNAKLITQRKFDNLTKAERGGLSELDKAGFIKRQLVETRQITKHVAQILDSRMNTKYDENDKLIREVKVITLKSKLVSDFRKDFQFYKVREINNYHHAHDAYLNAVVGTALIKKYPKLESEFVYGDYKVYDVRKMIAKSEQEIGKATAKYFFYSNIMNFFKTEITLANGEIRKRPLIETNGETGEIVWDKGRDFATVRKVLSMPQVNIVKKTEVQTGGFSKESILPKRNSDKLIARKKDWDPKKYGGFDSPTVAYSVLVVAKVEKGKSKKLKSVKELLGITIMERSSFEKNPIDFLEAKGYKEVKKDLIIKLPKYSLFELENGRKRMLASAGELQKGNELALPSKYVNFLYLASHYEKLKGSPEDNEQKQLFVEQHKHYLDEIIEQISEFSKRVILADANLDKVLSAYNKHRD

SEQ ID NO: 133 - protein, 357 aa, Artificial Sequence
  Synthetic polypeptide
DYKVYDVRKMIAKSEQEIGKATAKYFFYSNIMNFFKTEITLANGEIRKRPLIETNGETGEIVWDKGRDFATVRKVLSMPQVNIVKKTEVQTGGFSKESILPKRNSDKLIARKKDWDPKKYGGFDSPTVAYSVLVVAKVEKGKSKKLKSVKELLGITIMERSSFEKNPIDFLEAKGYKEVKKDLIIKLPKYSLFELENGRKRMLASAGELQKGNELALPSKYVNFLYLASHYEKLKGSPEDNEQKQLFVEQHKHYLDEIIEQISEFSKRVILADANLDKVLSAYNKHRDKPIREQAENIIHLFTLTNLGAPAAFKYFDTTIDRKRYTSTKEVLDATLIHQSITGLYETRIDLSQLGGD

SEQ ID NO: 134 - protein, 341 aa, Artificial Sequence
  Synthetic polypeptide
EIGKATAKYFFYSNIMNFFKTEITLANGEIRKRPLIETNGETGEIVWDKGRDFATVRKVLSMPQVNIVKKTEVQTGGFSKESILPKRNSDKLIARKKDWDPKKYGGFDSPTVAYSVLVVAKVEKGKSKKLKSVKELLGITIMERSSFEKNPIDFLEAKGYKEVKKDLIIKLPKYSLFELENGRKRMLASAGELQKGNELALPSKYVNFLYLASHYEKLKGSPEDNEQKQLFVEQHKHYLDEIIEQISEFSKRVILADANLDKVLSAYNKHRDKPIREQAENIIHLFTLTNLGAPAAFKYFDTTIDRKRYTSTKEVLDATLIHQSITGLYETRIDLSQLGGD

SEQ ID NO: 135 - protein, 328 aa, Artificial Sequence
  Synthetic polypeptide
NIMNFFKTEITLANGEIRKRPLIETNGETGEIVWDKGRDFATVRKVLSMPQVNIVKKTEVQTGGFSKESILPKRNSDKLIARKKDWDPKKYGGFDSPTVAYSVLVVAKVEKGKSKKLKSVKELLGITIMERSSFEKNPIDFLEAKGYKEVKKDLIIKLPKYSLFELENGRKRMLASAGELQKGNELALPSKYVNFLYLASHYEKLKGSPEDNEQKQLFVEQHKHYLDEIIEQISEFSKRVILADANLDKVLSAYNKHRDKPIREQAENIIHLFTLTNLGAPAAFKYFDTTIDRKRYTSTKEVLDATLIHQSITGLYETRIDLSQLGGD

SEQ ID NO: 136 - protein, 120 aa, Artificial Sequence
  Synthetic polypeptide
PEDNEQKQLFVEQHKHYLDEIIEQISEFSKRVILADANLDKVLSAYNKHRDKPIREQAENIIHLFTLTNLGAPAAFKYFDTTIDRKRYTSTKEVLDATLIHQSITGLYETRIDLSQLGGD

SEQ ID NO: 137 - protein, 69 aa, Artificial Sequence
  Synthetic polypeptide
KPIREQAENIIHLFTLTNLGAPAAFKYFDTTIDRKRYTSTKEVLDATLIHQSITGLYETRIDLSQLGGD

SEQ ID NO: 138 - protein, 1367 aa, Artificial Sequence
  Synthetic polypeptide
DKKYSIGLDIGTNSVGWAVITDEYKVPSKKFKVLGNTDRHSIKKNLIGALLFDSGETAEATRLKRTARRRYTRRKNRICYLQEIFSNEMAKVDDSFFHRLEESFLVEEDKKHERHPIFGNIVDEVAYHEKYPTIYHLRKKLVDSTDKADLRLIYLALAHMIKFRGHFLIEGDLNPDNSDVDKLFIQLVQTYNQLFEENPINASGVDAKAILSARLSKSRRLENLIAQLPGEKKNGLFGNLIALSLGLTPNFKSNFDLAEDAKLQLSKDTYDDDLDNLLAQIGDQYADLFLAAKNLSDAILLSDILRVNTEITKAPLSASMIKRYDEHHQDLTLLKALVRQQLPEKYKEIFFDQSKNGYAGYIDGGASQEEFYKFIKPILEKMDGTEELLVKLNREDLLRKQRTFDNGSIPHQIHLGELHAILRRQEDFYPFLKDNREKIEKILTFRIPYYVGPLARGNSRFAWMTRKSEETITPWNFEEVVDKGASAQSFIERMTNFDKNLPNEKVLPKHSLLYEYFTVYNELTKVKYVTEGMRKPAFLSGEQKKAIVDLLFKTNRKVTVKQLKEDYFKKIECFDSVEISGVEDRFNASLGTYHDLLKIIKDKDFLDNEENEDILEDIVLTLTLFEDREMIEERLKTYAHLFDDKVMKQLKRRRYTGWGRLSRKLINGIRDKQSGKTILDFLKSDGFANRNFMQLIHDDSLTFKEDIQKAQVSGQGDSLHEHIANLAGSPAIKKGILQTVKVVDELVKVMGRHKPENIVIEMARENQTTQKGQKNSRERMKRIEEGIKELGSQILKEHPVENTQLQNEKLYLYYLQNGRDMYVDQELDINRLSDYDVDAIVPQSFLKDDSIDNKVLTRSDKNRGKSDNVPSEEVVKKMKNYWRQLLNAKLITQRKFDNLTKAERGGLSELDKAGFIKRQLVETRQITKHVAQILDSRMNTKYDENDKLIREVKVITLKSKLVSDFRKDFQFYKVREINNYHHAHDAYLNAVVGTALIKKYPKLESEFVYGDYKVYDVRKMIAKSEQEIGKATAKYFFYSNIMNFFKTEITLANGEIRKRPLIETNGETGEIVWDKGRDFATVRKVLSMPQVNIVKKTEVQTGGFSKESILPKRNSDKLIARKKDWDPKKYGGFVSPTVAYSVLVVAKVEKGKSKKLKSVKELLGITIMERSSFEKNPIDFLEAKGYKEVKKDLIIKLPKYSLFELENGRKRMLASARELQKGNELALPSKYVNFLYLASHYEKLKGSPEDNEQKQLFVEQHKHYLDEIIEQISEFSKRVILADANLDKVLSAYNKHRDKPIREQAENIIHLFTLTNLGAPAAFKYFDTTIDRKQYRSTKEVLDATLIHQSITGLYETRIDLSQLGGD

SEQ ID NO: 139 - protein, 1367 aa, Artificial Sequence
  Synthetic polypeptide
DKKYSIGLDIGTNSVGWAVITDEYKVPSKKFKVLGNTDRHSIKKNLIGALLFDSGETAEATRLKRTARRRYTRRKNRICYLQEIFSNEMAKVDDSFFHRLEESFLVEEDKKHERHPIFGNIVDEVAYHEKYPTIYHLRKKLVDSTDKADLRLIYLALAHMIKFRGHFLIEGDLNPDNSDVDKLFIQLVQTYNQLFEENPINASGVDAKAILSARLSKSRRLENLIAQLPGEKKNGLFGNLIALSLGLTPNFKSNFDLAEDAKLQLSKDTYDDDLDNLLAQIGDQYADLFLAAKNLSDAILLSDILRVNTEITKAPLSASMIKRYDEHHQDLTLLKALVRQQLPEKYKEIFFDQSKNGYAGYIDGGASQEEFYKFIKPILEKMDGTEELLVKLNREDLLRKQRTFDNGSIPHQIHLGELHAILRRQEDFYPFLKDNREKIEKILTFRIPYYVGPLARGNSRFAWMTRKSEETITPWNFEEVVDKGASAQSFIERMTNFDKNLPNEKVLPKHSLLYEYFTVYNELTKVKYVTEGMRKPAFLSGEQKKAIVDLLFKTNRKVTVKQLKEDYFKKIECFDSVEISGVEDRFNASLGTYHDLLKIIKDKDFLDNEENEDILEDIVLTLTLFEDREMIEERLKTYAHLFDDKVMKQLKRRRYTGWGRLSRKLINGIRDKQSGKTILDFLKSDGFANRNFMQLIHDDSLTFKEDIQKAQVSGQGDSLHEHIANLAGSPAIKKGILQTVKVVDELVKVMGRHKPENIVIEMARENQTTQKGQKNSRERMKRIEEGIKELGSQILKEHPVENTQLQNEKLYLYYLQNGRDMYVDQELDINRLSDYDVDAIVPQSFLKDDSIDNKVLTRSDKNRGKSDNVPSEEVVKKMKNYWRQLLNAKLITQRKFDNLTKAERGGLSELDKAGFIKRQLVETRQITKHVAQILDSRMNTKYDENDKLIREVKVITLKSKLVSDFRKDFQFYKVREINNYHHAHDAYLNAVVGTALIKKYPKLESEFVYGDYKVYDVRKMIAKSEQEIGKATAKYFFYSNIMNFFKTEITLANGEIRKRPLIETNGETGEIVWDKGRDFATVRKVLSMPQVNIVKKTEVQTGGFSKESILPKRNSDKLIARKKDWDPKKYGGFVSPTVAYSVLVVAKVEKGKSKKLKSVKELLGITIMERSSFEKNPIDFLEAKGYKEVKKDLIIKLPKYSLFELENGRKRMLASARELQKGNELALPSKYVNFLYLASHYEKLKGSPEDNEQKQLFVEQHKHYLDEIIEQISEFSKRVILADANLDKVLSAYNKHRDKPIREQAENIIHLFTLTNLGAPAAFKYFDTTIDRKEYRSTKEVLDATLIHQSITGLYETRIDLSQLGGD

SEQ ID NO: 140 - protein, 6 aa, Artificial Sequence
  Synthetic polypeptide
NNNRRT

SEQ ID NO: 141 - DNA, 91 bp, Artificial Sequence
  Synthetic polynucleotide
guuuuaguacucuguaaugaaaauuacagaaucuacuaaaacaaggcaaaaugccguguuuaucucgucaacuuguuggcgagauuuuuuu
